(19) United States
(12) Patent Application Publication
(10) Pub. No.: US 2024/0263251 A1
(43) Pub. Date: Aug. 8, 2024

(54) COMPOSITIONS AND METHODS FOR PROVIDING SECONDARY BILE ACIDS TO A SUBJECT

(71) Applicant: Finch Therapeutics Holdings LLC, Boston, MA (US)

(72) Inventors: Mark SMITH, Cambridge, MA (US); Sonia TIMBERLAKE, Brookline, MA (US); Rotem Gura SADOVSKY, San Antonio, TX (US); Daniel PETERSON, Seattle, WA (US); Christopher WEIDENMAIER, Brookline, MA (US)

(73) Assignee: Finch Therapeutics Holdings LLC, Boston, MA (US)

(21) Appl. No.: 18/451,985

(22) PCT Filed: Feb. 18, 2022
(86) PCT No.: PCT/US2022/017049

§ 371 Date: Aug. 18, 2023

Related U.S. Application Data
(60) Provisional application No. 63/218,122, filed on Jul. 2, 2021.
(60) Provisional application No. 63/163,497, filed on Mar. 19, 2021.
(60) Provisional application No. 63/151,495, filed on Feb. 19, 2021.

(51) Int. Cl. C12Q 1/689; A61K 35/74; A61K 38/44; A61K 48/00; A61P 3/00

(52) U.S. Cl. CPC C12Q 1/689; A61K 35/74; A61K 38/44; A61K 48/005; A61P 3/00; C12Y 101/01145; C12Y 103/01003; C12Y 103/01022; C12Q 2600/106

(57) ABSTRACT

The present disclosure relates to microbial compositions for enhancing bile acid metabolism in a subject, methods of manufacturing the compositions, and methods of selecting subjects in need of treatment with the compositions. Certain bile acid transforming or converting genes and bile acid transforming or converting bacteria are used to select desired bacterial isolates or suitable donors or patients, predict treatment success, or track treatment response.

### CROSS-REFERENCE TO RELATED APPLICATIONS

[0001] This application claims the benefit of U.S. Provisional Application No. 63/151,495, filed Feb. 19, 2021, U.S. Provisional Application No. 63/163,497, filed Mar. 19, 2021, and U.S. Provisional Application No. 63/218,122, filed Jul. 2, 2021, all of which are incorporated by reference in their entireties herein.

### INCORPORATION-BY-REFERENCE OF MATERIALS FILED ON A COMPACT DISC

[0002] The instant application contains a Sequence Listing which has been submitted electronically in ASCII format and is hereby incorporated by reference in its entirety. Said ASCII copy, created on Feb. 18, 2022, is named P35054WO00_SL.txt and is 931,093 bytes in size.

### BACKGROUND

[0003] Implantation or administration of human colonic microbiota into the bowel of a sick patient is called Fecal Microbiota Transplantation (FMT), also commonly known as fecal bacteriotherapy. FMT is believed to repopulate the gut with a diverse array of microbes that control key pathogens by creating an ecological environment inimical to their proliferation and survival. It represents a therapeutic protocol that allows a fast reconstitution of a normal compositional and functional gut microbial community.

[0004] FMT has been used to treat Clostridium difficile infection (CDI). FMT has also been suggested in treating other gut infective agents such as E. coli and Vancomycin resistant Enterococci (VRE). It entails infusions through a colonoscope, an enema or via a nasojejunal tube of human microbiota either in the form of homogenized stool, or cultured stool components such as Clostridia, to implant in the colon and thereby displace or eradicate pathogenic bacteria, e.g., C. difficile. Fecal bacteriotherapy has also been successful in treating conditions having a neurological component, such as ASD, Parkinson's Disease, and Multiple Sclerosis and Chronic Fatigue Syndrome.

[0005] Compositions for performing FMT typically incorporate the fecal microbiota of stool collected from healthy human donors. However, the microbial content of stool is not uniform across donors, or even longitudinally across different samples collected from the same donor. As a result, different doses of an FMT composition can vary in microbial constitution, for example in the presence or absence of a specific species or strain of bacteria or in the relative abundance of a bacterial species or strain.

[0006] An inability to regulate the identity and/or relative abundances of species or strain of bacteria in an FMT formulation may result in reduced and/or variable efficacy when administered to patients, if a particular bacterial species or strain or group of species or strain is associated with or needed for the treatment of a condition, for example by inducing a therapeutic response in a patient's cells. Further, a patient population to be administered a live biotherapeutic product may vary significantly in the identities and relative abundances of bacterial species or strain in the microbiome, even among patients exhibiting similar symptoms.

### SUMMARY

[0007] In an aspect, the present disclosure provides a method of selecting a subject in need of supplementation with bile acid transforming bacteria that produce a secondary bile acid from a primary bile acid, the method comprising: determining a number of bacterial clades or species in a microbiome of the individual that comprise a nucleic acid comprising a bile acid metabolism consensus sequence associated with production of the secondary bile acid from the primary bile acid; and selecting the individual as the subject on the basis of determining that the number of bacterial clades or species is less than a threshold value.

[0008] In another aspect, the present disclosure provides a method of treating a deficiency in the metabolism of a primary bile acid to a secondary bile acid in a subject in need thereof, the method comprising: administering a bacterial isolate to the subject to treat the deficiency, wherein the bacterial isolate comprises a bai gene.

[0009] In another aspect, the present disclosure provides a method of manufacturing a pharmaceutical composition for administration to a subject to alleviate a deficiency in bile acid metabolism, the method comprising: selecting a bacterial isolate from a stool of a human donor on the basis of a sequence identity of a nucleic acid of the bacterial isolate to a nucleic acid of a bacterial clade or species in a fecal microbiota of a subject who does not have a history of or is in remission from a disorder related to an intestinal dysbiosis, wherein the nucleic acid comprises a bile acid metabolism consensus sequence that codes for all or a portion of an enzyme that functions in a metabolic pathway producing a primary or a secondary bile acid, and wherein the sequence identity is at least 97%; and incorporating the bacterial isolate into the pharmaceutical composition.

[0010] In another aspect, the present disclosure provides a method, comprising: selecting a stool of a donor on the basis of the presence of one or more strains of bile acid metabolizing bacteria in the donor, wherein the one or more strains of bile acid metabolizing bacteria are capable of producing a bile acid by transforming a primary bile acid to a secondary bile acid or a first secondary bile acid to a second secondary bile acid; isolating the one or more strains of bile acid metabolizing bacteria; and incorporating the bile acid metabolizing bacteria into a pharmaceutical composition.

[0011] In a further aspect, the present disclosure provides a method of treating inflammatory bowel disease in a subject in need thereof, the method comprising: determining that a fecal microbiota of the subject comprises one or fewer bacterial clades or species capable of transforming a primary bile acid to a secondary bile acid; and administering to the subject a bacterial species or strain comprising one or more bai genes.

[0012] In yet another aspect, the present disclosure provides a method of treating a secondary bile acid deficiency in a subject lacking a functional bai operon, the method comprising administering to the subject a bacterial species or strain comprising the functional bai operon.

[0013] In another aspect, the present disclosure provides a method of restoring a bai operon to a microbiome of a subject lacking a functional copy of the bai gene operon, the method comprising administering to the subject a bacterial isolate comprising the bai gene operon.

[0014] In a further aspect, the present disclosure provides a method of treating a disorder related to an intestinal dysbiosis in a subject in need thereof, the method comprising: determining that a fecal microbiota of the subject comprises three or fewer bacterial clades or species comprising a bile acid metabolism consensus sequence, wherein a bacterial clade or species comprising the bile acid metabolism consensus sequence produces a gene product that catalyzes a step in a metabolic pathway that converts a first secondary bile acid to a second secondary bile acid; and administering to the subject one or more bacterial strains comprising the gene encoding the gene product.

[0015] In another aspect, the present disclosure provides a method of treating a subject in need of supplementation with bile acid converting bacteria, the method comprising: determining a number of bacterial clades or species in a microbiome of an individual that comprise a nucleic acid comprising a bile acid metabolism consensus sequence; selecting the individual as the subject on the basis of determining that the number of bacterial clades or species is less than a threshold value; and administering to the subject the bile acid converting bacteria; wherein the bile acid converting bacteria comprises bacteria that produce isoalloLCA.

[0016] In another aspect, the present disclosure provides a method of treating a subject in need of supplementation with bile acid converting bacteria, the method comprising: determining a deficiency of a secondary bile acid in the subject, wherein the deficient secondary bile acid comprises at least isoalloLCA; and administering to the subject bile acid converting bacteria, wherein following administration the bile acid converting bacteria produce the isoalloLCA in the subject.

[0017] In another aspect, the present disclosure provides a method of manufacturing a pharmaceutical composition for administration to a subject to alleviate a deficiency in bile acid metabolism, the method comprising: selecting a donor based on a presence or abundance of isoalloLCA above a threshold level in a stool of the donor; obtaining at least one bacterial isolate from the stool of the donor, wherein the bacterial isolate comprises a DNA sequence coding for an enzyme that synthesizes isoalloLCA; and incorporating the at least one bacterial isolate into the pharmaceutical composition.

[0018] In another aspect, the present disclosure provides a method comprising: selecting a stool on the basis of the presence of one or more bile acid metabolizing bacteria in a stool of a donor, wherein the one or more bile acid metabolizing bacteria are capable of producing isoalloLCA; isolating the one or more bile acid metabolizing bacteria; and incorporating the bile acid metabolizing bacteria into a pharmaceutical composition.

[0019] In another aspect, the present disclosure provides a method of treating dysbiosis in a subject in need thereof, the method comprising: determining that a fecal microbiota of the subject comprises one or fewer bacterial clades or species capable of producing isoalloLCA; and administering to the subject at least one bacterial species comprising a gene selected from the group consisting of a gene encoding 5β-reductase, a gene encoding 5α-reductase, a gene encoding 3β-HSDH, and a combination thereof.

[0020] In another aspect, the present disclosure provides a method of supplementing a microbiome of a subject with isoalloLCA, the method comprising administering to the subject a DNA sequence that encodes an enzyme that functions in the metabolic pathway that synthesizes isoalloLCA.

### BRIEF DESCRIPTION OF THE DRAWINGS

[0021] FIG. 1A: A diagram showing the secondary bile acid levels of Crohn's disease (CD), and ulcerative colitis (UC) subjects relative to subjects that do not have Crohn's or UC.

[0022] FIG. 1B: A diagram showing the relationship between the ratio of the secondary bile acid DCA to its corresponding primary bile acid CA (DCA:CA_log 10) and the ratio of the secondary bile acid LCA to its corresponding primary bile acid CDCA (LCA:CDCA_log 10) in non-IBD subjects and patients with UC and CD.

[0023] FIG. 2: A diagram showing the correlation between secondary bile acid expression and bai gene abundance.

[0024] FIG. 3: A diagram showing the repletion of primary bile acid transforming bacteria predicts a subject's response to fecal microbiota transplantation (FMT).

[0025] FIG. 4A: A schematic of the eight bile-acid inducible operon (bai) genes required for primary-to-secondary bile acid transformation.

[0026] FIG. 4B: A diagram showing the number of bai genes detected in a patient in the weeks following a single FMT treatment.

[0027] FIG. 5A: A diagram showing that a single clade of primary bile acid transforming bacteria in a subject can normalize the secondary bile acid deoxycholate.

[0028] FIG. 5B: A diagram showing that a single clade of primary bile acid transforming bacteria in a subject can normalize the secondary bile acid lithocholic acid.

[0029] FIG. 6: A diagram showing bile acid transforming bacteria clades in the Firmicutes phylum (left panel) and varying prevalence of bile acid transforming clades between stool from healthy subjects and subjects with UC or CD (right panel).

[0030] FIG. 7: A diagram showing the transformation of primary bile acids to secondary bile-acids and the further metabolism of secondary bile acids.

[0031] FIG. 8: A diagram showing the relationship between the ratio of secondary bile acid (DCA) to primary bile acid CA (DCA:CA) and the abundance of bile acid transforming bacteria in non-IBD subjects and patients with Crohn's disease (CD).

[0032] FIG. 9: A diagram showing responding and non-responding (true or false) Crohn's disease patients' relative abundance shift in bacteria carrying the bai gene operon (y-axis) following administration of FMT in various studies (x-axis). Patients' bile acid transforming bacteria can serve as a prognosis biomarker for FMT-based CD treatments.

[0033] FIG. 10A: A diagram showing the luminescence readouts (y-axis) of a cell assay testing the ability of different stimulants comprising different bile acid concentrations (x-axis) to activate TGR5. PBA=primary bile acid; SBA=secondary bile acid; isoSBA1=3-oxo-lithocholic acid (3-oxo-LCA, 30LCA); isoSBA2=isolithocholic acid (isoLCA, ILCA); SBA 1=lithocholic acid (LCA); SBA2=deoxycholic acid (DCA); PBA1=chenodeoxycholic acid (CDCA); PBA2=cholic acid (CA); isoSBA3=alloisolithocholic acid (alloisoLCA, AILCA, isoalloLCA, IALCA); SBA3=ursodeoxycholic acid (UDCA); Pos. control=3-(2-chlorophenyl)-N-(4-chlorophenyl)-N,5-dimethylisoxazole-4-carboxamide.

[0034] FIG. 10B: A diagram showing the luminescence readouts (y-axis) of a cell assay testing the ability of different bacterial strains (x-axis) to active TGR5 by testing bacterial strain supernatants after incubation with PBA. PBA=primary bile acid; 1=Clostridium scindens (strain 1); 2=Clostridium scindens (strain 2); 3=Clostridium hylemonae; control=Bacteroides fragilis); PBA1=cholic acid (CA); PBA2=chenodeoxycholic acid (CDCA).

[0035] FIG. 11: A diagram showing the abundance of isoalloLCA-producing genes (y-asis) in non-inflammatory bowel disease (non-IBD) samples, Crohn's disease (CD) samples, and ulcerative colitis (UC) samples classified as dysbiotic or normal (x-axis). CPM=counts per million.

### DETAILED DESCRIPTION

[0036] Unless defined otherwise, all technical and scientific terms used herein have the same meaning as commonly understood by one of ordinary skill in the art to which this disclosure belongs.

[0037] All publications, patents, and patent applications mentioned in this specification are herein incorporated by reference to the same extent as if each individual publication, patent, or patent application was specifically and individually indicated to be incorporated by reference.

[0038] As used herein and in the appended claims, the singular forms “a,” “an,” and “the” include plural referents unless the context clearly dictates otherwise. By way of example, “an element” means at least one element and can include more than one element.

[0039] As used herein, the term “substantially”, when used to modify a quality, generally allows certain degree of variation without that quality being lost. For example, in certain aspects such degree of variation can be less than 0.1%, about 0.1%, about 0.2%, about 0.3%, about 0.4%, about 0.5%, about 0.6%, about 0.7%, about 0.8%, about 0.9%, about 1%, between 1-2%, between 2-3%, between 3-4%, between 4-5%, or greater than 5% or 10%.

[0040] Where a range of values is provided, it is understood that each intervening value, between the upper and lower limit of that range and any other stated or intervening value in that stated range is encompassed within the disclosure. The upper and lower limits of these smaller ranges may independently be included in the smaller ranges, and are also encompassed within the disclosure, subject to any specifically excluded limit in the stated range. Where the stated range includes one or both of the limits, ranges excluding either both of those included limits are also included in the disclosure.

[0041] As used herein, the term “relative abundance” of a bacterial taxon (e.g., strain or species) refers to relative representation of cells of that taxon among cells of all taxa in the community (e.g., a fecal microbiota, a processed consortium of fecal bacteria or a bacterial mixture). Relative abundance refers to the abundance of cells of a particular species of bacteria by the abundance of all organisms of similar nature in a certain community. In an aspect, relative abundance refers to the abundance of cells of a particular strain of bacteria relative to the abundance of all bacteria of the same species in a certain community. In an aspect, relative abundance refers to the abundance of cells of a particular strain of bacteria relative to the abundance of all bacterial cells in a community. In an aspect, relative abundance is measured by qPCR comparing PCR products generated with 16S primers targeting specific bacteria species (or strain) of interest against PCR products generated with universal primers targeting all 16S sequences. See e.g., Chu, N., et al., “Profiling living bacteria informs preparation of fecal microbiota transplantations.” PLoS One 12(1): 1-16 (2017). In another aspect, the relative abundance is measured based on the number of sequence reads detected via high-throughput sequencing. Unless specified otherwise, a bacterial relative abundance mentioned herein is measured via high-throughput sequencing. In a further aspect, propidium monoazide (PMA) is used to differentiate between viable and dead fecal microbes as shown in Chu et al., PLoS One 12(1): 1-16 (2017).

[0042] As used herein, the term “treating” refers to (i) completely or partially inhibiting a disease, disorder or condition, for example, arresting its development; (ii) completely or partially relieving a disease, disorder or condition, for example, causing regression of the disease, disorder and/or condition; or (iii) completely or partially preventing a disease, disorder or condition from occurring in a patient that may be predisposed to the disease, disorder and/or condition, but has not yet been diagnosed as having it. Similarly, “treatment” refers to both therapeutic treatment and prophylactic or preventative measures.

[0043] As used herein, a “subject” refers to any animal subject including humans, laboratory animals (e.g., primates, rats, mice), livestock (e.g., cows, sheep, goats, pigs, turkeys, chickens), and household pets (e.g., dogs, cats, rodents, etc.). Preferred subjects are human subjects. The human subject may be a pediatric, adult or a geriatric subject. In some aspects, the terms “patient” and “subject” are used interchangeably.

[0044] In an aspect, “secondary bile acid deficiency”, “bile acid metabolism deficiency”, or “deficiency in bile acid metabolism” refers to a person unable to transform primary bile acids to secondary bile acids at a level equal to a healthy human subject. In another aspect, a subject in need of supplementation with bile acid transforming bacteria refers to a subject with a bile acid metabolism deficiency or a secondary bile acid deficiency.

[0045] In an aspect, a “bacterial clade” or “clade” refers to a group of bacteria or taxa that locate proximately on a taxonomic or phylogenetic tree and share one or more bile acid metabolism consensus sequences. In an aspect, a bacterial clade comprises bacteria that share a taxonomic relatedness based on a 16S comparison. In another aspect, a bacterial clade comprises a single family of bacteria. In yet another aspect, a bacterial clade comprises a single genus of bacteria. In another aspect, a bacterial clade is comprised of bacteria comprising one or more common bile acid metabolism consensus sequences and one or more bacteria species (or strains). In an aspect, a bacterial clade refers to all nodes, extinct and living, in a branch of a rooted phylogenetic tree. In an aspect, a bacterial clade is delimited by a shared common ancestor (i.e., an internal node of interest) and all its descendants in a phylogenetic tree, making it monophyletic. Terminal nodes in a clade represent current living descendants of their shared common ancestor, and internal nodes represent intermediates between the shared common ancestor and extant organisms.

[0046] As used herein, a “strain” refers to a variant of a species differing in some genetic, epigenetic and/or phenotypic aspect to an extent that is insufficient to result in a new species. As used herein, whenever a composition comprises a bacterial species, in certain aspects such species may be present in the composition in multiple strains or variants. Also as used herein, a composition can comprise strains of different bacterial species.

[0047] As used herein, a “stool” refers to solid matter or part thereof that is released by a mammal (e.g., human), typically due to a bowel movement.

[0048] As used herein, a “microbiota” and “flora” refer to a consortium of microbes that live in or on a subject's body, both sustainably and transiently, including eukaryotes, archaea, bacteria, and viruses (including bacterial viruses (i.e., phage)). A “fecal microbiota” or “fecal microbiota preparation” refers to a community of microbes present in or prepared from a subject's feces. Herein a “consortium of fecal bacteria” refers to a composition of multiple species (or strains) of bacteria that have been extracted or harvested together from a stool of a donor. Following extraction or harvesting from a stool, the multiple species or strains of bacteria in a consortium of fecal bacteria are not isolated or purified away from each other (although they may have been co-cultured) and hence each species or strains in a consortium of fecal bacteria traces a temporally continuous co-habitation or co-environment with every other species or strain in the consortium, from their presence together in a stool to their co-existence in a formulated pharmaceutical composition described herein. In one aspect, a fecal microbiota transplant (FMT) therapy includes a consortium of fecal bacteria.

[0049] In an aspect, a consortium of fecal bacteria comprises at least two, at least three, at least four, at least five, at least six, at least seven, at least eight, at least nine, at least ten, at least eleven, at least twelve, at least thirteen, at least fourteen, at least fifteen, at least sixteen, at least seventeen, at least eighteen, at least nineteen, at least twenty, at least thirty, at least forty, at least fifty, at least sixty, at least seventy, at least eighty, at least ninety, at least one hundred, at least one hundred and fifty, at least two hundred, at least two hundred and fifty, at least three hundred, at least three hundred fifty, at least four hundred, at least four hundred and fifty, at least five hundred, at least six hundred, at least seven hundred, at least eight hundred, at least nine hundred, at least one thousand, or more than one thousand species or strains of fecal bacteria.

[0050] In an aspect, a consortium of fecal bacteria comprises at least two, at least three, at least four, at least five, at least six, at least seven, at least eight, at least nine, at least ten, at least eleven, at least twelve, at least thirteen, at least fourteen, at least fifteen, at least sixteen, at least seventeen, at least eighteen, at least nineteen, at least twenty, at least thirty, at least forty, at least fifty, at least sixty, at least seventy, at least eighty, at least ninety, at least one hundred, at least one hundred and fifty, at least two hundred, at least two hundred and fifty, at least three hundred, at least three hundred fifty, at least four hundred, at least four hundred and fifty, at least five hundred, at least six hundred, at least seven hundred, at least eight hundred, at least nine hundred, at least one thousand, or more than one thousand strains of a species of fecal bacteria. In another aspect, a consortium of fecal bacteria comprises a single strain of a species and excludes one or more strains of the same species. In an aspect, a consortium of fecal bacteria comprises strains of bacteria from different species. In an aspect, a consortium of fecal bacteria comprises strains of bacteria from different genera. In an aspect, a consortium of fecal bacteria comprises strains of bacteria from different families. In an aspect, a consortium of fecal bacteria comprises strains of bacteria from different orders. In an aspect, a consortium of fecal bacteria comprises strains of bacteria from different classes. In an aspect, a consortium of fecal bacteria comprises strains of bacteria from different phyla. In an aspect, a consortium of fecal bacteria comprises the complement of bacteria in a fecal microbiota. In an aspect, a consortium of fecal bacteria is in the form of a substantially complete fecal microbiota. Herein the term “substantially complete fecal microbiota” refers to a preparation that comprises viable bacterial cells from all or substantially all of the bacterial taxa represented among the viable bacterial cells in the stool from which the fecal microbiota was extracted. In an aspect, the relative abundance of viable bacterial cells from at least two of the taxa in the substantially complete fecal microbiota is proportional to the relative abundance of the viable cells from those taxa in the stool from which the fecal microbiota was extracted.

[0051] Typically, a consortium of fecal bacteria described herein is extracted from a stool or stools of a single human donor. In an aspect, a consortium of fecal bacteria from the stool of one donor is combined or blended with a consortium of fecal bacteria from the stool of a different donor to produce a composition comprising consortia of fecal bacteria.

[0052] In an aspect, a consortium of fecal bacteria comprises bacteria that have not been subject to culturing and as such comprise uncultured fecal bacteria. Herein “uncultured fecal bacteria” or a “preparation of uncultured fecal bacteria” refers to a mixture of bacteria extracted together from a stool, wherein the bacteria in the mixture have not been subjected to culturing or fermentation in artificial growth media. Herein such a preparation of uncultured fecal bacteria can also be referred to as a collection of uncultured fecal bacteria or a population or community of uncultured fecal bacteria.

[0053] In another aspect, a consortium of fecal bacteria comprises bacteria (e.g. bacterial strains) that have been subjected to culturing or fermentation. For example, a fecal microbiota can be mixed with a culturing or fermentation medium that facilitates the replication of bacterial cells of different species and optionally the maintenance over time during replication of the relative abundance of particular species relative to the relative abundance of such species in the fecal microbiota prior to culturing or fermentation.

[0054] In some aspects, a consortium of fecal bacteria from a fecal microbiota comprises non-selected fecal bacteria. Herein “non-selected fecal bacteria” refers to a collection of viable fecal bacteria (e.g., bacterial strains present in a fecal microbiota) extracted from one or more stools without subjecting the extracted bacteria to environmental conditions that intentionally select for a particular type, state or taxonomic category of bacteria (e.g., by deliberate removal of certain species of bacteria, treatment of the bacteria with an agent such as ethanol or chloroform, or culturing). Such non-selected fecal bacteria can comprise bacteria in proportional content to corresponding bacteria in a fecal or intestinal microbiota of a normal healthy human. Steps taken to non-selectively extract fecal bacteria from a stool or portion thereof can include, for example, homogenization and filtering of the stool or portion thereof to separate the fecal bacteria from non-cellular stool material such as fiber and rough particulate matter, as well as, for example, eukaryotic host cells and viruses. Herein typically a non-selected fecal bacterial preparation can be prepared in either aerobic or anaerobic conditions, or a combination thereof. In certain aspects, a preparation of non-selected fecal bacteria comprises all or substantially all of the bacteria of a fecal microbiota of a stool or portion thereof. In certain aspects, a preparation of non-selected fecal bacteria comprises all or substantially all of the species of a fecal microbiota of a stool or portion thereof. In certain aspects, a preparation of non-selected fecal bacteria comprises all or substantially all of the bacterial species or strains of a fecal microbiota of a stool or portion thereof. In certain aspects, a preparation of non-selected fecal bacteria comprises all or substantially all of the bacterial genera of a fecal microbiota of a stool or a portion thereof. In certain aspects, a preparation of non-selected fecal bacteria comprises all or substantially all of the bacterial phyla of a fecal microbiota of a stool or portion thereof. Therefore, such non-selective fecal microbiota can substantially resemble microbial constituents and the bacterial population structure found in such fecal sample. In an aspect, a consortium of fecal bacteria comprises at least 2, 5, 10, 20, 30, 40, 50, 100, 200, 300, 400, 500, or 600 bacterial species or strains. In another aspect, a consortium of fecal bacteria comprises between 2 and 5, 5 and 10, 10 and 20, 20 and 30, 30 and 40, 40 and 50, 50 and 60, 60 and 100, 100 and 200, 200 and 300, 300 and 400, 400 and 500, or 500 and 600 bacterial species or strains.

[0055] In an aspect, a consortium of fecal bacteria (e.g., a preparation of uncultured fecal bacteria and/or a preparation of non-selected fecal bacteria) does not comprise an antibiotic resistant population of bacteria.

[0056] In another aspect, the preparation of a composition comprising a consortium of fecal bacteria can involve steps that select for a particular, type, state, or taxonomic category of bacteria (e.g., by deliberate removal of certain strain or species of bacteria, treatment of the population with a selective agent such as ethanol or chloroform, culturing the bacteria in selective media and/or screening of the bacteria for the ability to produce a metabolite at or above a threshold level).

[0057] Herein a consortium of fecal bacteria is distinguished from an isolated or purified strain or species of bacteria. As used herein, “bacterial isolate” refers to a collection of isolated, substantially genetically identical bacterial cells generated by proliferation via binary fission from a single predecessor bacterial cell (e.g., by culturing the bacteria). Typically, a bacterial isolate is originally isolated as a single cell or genetically pure group of cells, for example, as a single colony on solid culture media or via serial dilutions in liquid culture, and thereafter archived (e.g. as a frozen stock) to provide a consistent and stable source for the isolate. Once isolated, in some aspects, a bacterial isolate can be grown as a pure culture of cells; in other aspects, multiple bacterial isolates can be grown simultaneously in the same vessel as a mixed culture. The term “substantially genetically identical” refers to the very high (e.g. >99.9%) genetic identity shared by different cells in uncontaminated pure compositions of bacterial isolates, owing to their proliferation from a common predecessor, but accounts for minor genetic dissimilarity between cells due to accumulations of relatively rare mutations. Generally, a bacterial isolate is synonymous with a pure culture of bacterial cells. Typically, herein a bacterial isolate consists of non-pathogenic bacteria. In an aspect, a bacterial isolate can be a probiotic, or an ingredient in a probiotic.

[0058] As used herein, the term “culture” or “culturing” refers to the growth of cells in an artificial medium that is designed to facilitate the expansion, reproduction or propagation of microbial cells. Without limitation, culturing can occur in a liquid, semi-solid, or solid growth medium, such as broth or agar. Growth medium typically contains appropriate nutrients for the growth of the microbial cells.

[0059] As used herein, the term “bacterial cocktail”, sometimes called a “bacterial consortium” or “synthetic bacterial mixture”, refers to an engineered mixture of bacteria comprising a defined consortium of multiple bacterial isolates. The term “defined consortium of multiple bacterial isolates” means that the bacterial cocktail contains two or more bacterial isolates, and that the identity of each bacterial isolate in the cocktail is known, and thus the cocktail can be consistently produced (e.g. by combining isolated bacterial strain or species) to have a stable composition and properties across separate batches. Herein “identity” of a bacterial isolate can refer to any characteristic of the isolate that uniquely identifies the isolate as different from one or more other bacterial isolates or bacterial strain or species. Examples of identifying characteristics of a bacterial isolate include nucleotide sequences such as a 16S rRNA sequence, the sequence of one or more coding or non-coding regions of a nucleic acid, and entire genome sequences, level of gene expression, physiological or metabolic traits, or anatomical traits such as staining pattern or cell wall characteristics.

[0060] As used herein, “bacterial mixture” refers to an engineered composition comprising viable bacterial cells. In some aspects, a bacterial mixture comprises one or more non-pathogenic bacterial isolates. In some aspects, a bacterial mixture comprises a consortium of fecal bacteria. In some aspects, a bacterial mixture comprises both of one or more non-pathogenic bacterial isolates and a consortium of fecal bacteria. In another aspect, a bacterial mixture comprises a consortium of fecal bacteria from one or more donors.

[0061] As used herein, “therapeutically effective amount,” “effective amount” or “pharmaceutically active dose” refers to an amount of a composition which is effective in treating the named disease, disorder, condition, or symptom.

[0062] As used herein, “isolated” or “purified” refers to a bacterium or other entity or substance that has been (1) separated from at least some of the components with which it was associated when initially produced (whether it was initially produced in nature or in an experimental setting), and/or (2) produced, prepared, purified, and/or manufactured by the hand of man. Isolated or purified bacteria can be separated from at least about 10%, about 20%, about 30%, about 40%, about 50%, about 60%, about 70%, about 80%, about 90%, or more of the other components with which they were initially associated.

[0063] As used herein, the terms “non-pathogenic” in reference to a bacterium or any other organism or entity includes any such organism or entity that is not capable of causing or affecting a disease, disorder or condition of a host organism containing the organism or entity.

[0064] As used herein, “spore” or a population of “spores” includes bacteria (or other single-celled organisms) that are generally viable, more resistant to environmental influences such as heat and bactericidal agents than vegetative forms of the same bacteria, and typically capable of germination and out-growth. “Spore-formers” or bacteria “capable of forming spores” are those bacteria containing the genes and other necessary abilities to produce spores under suitable environmental conditions.

[0065] As used herein, “colony forming units” (CFUs) refers to an estimate of the number of viable microorganism cells in a given sample. The number of CFUs can be assessed by counting the number of colonies on an agar plate as in standard methods for determining the number of viable bacterial cells in a sample.

[0066] As used herein, “viable” means possessing the ability to multiply. The viability of bacterial populations can be monitored as a function of the membrane integrity of the cell. Cells with a compromised membrane are considered to be dead or dying, whereas cells with an intact membrane are considered live. For example, SYTO 9 and propidium iodide are used to stain and differentiate live and dead bacteria. See Stocks, Cytometry A. 2004 October; 61(2):189-95. Cell viability can also be evaluated via molecular viability analyses, e.g., a PCR-based approach, which can differentiate nucleic acids associated with viable cells from those associated with inactivated cells. See Cangelosi and Mescheke, Appl Environ Microbiol. 2014 October; 80(19): 5884-5891.

[0067] As used herein, “Shannon Diversity Index” refers to a diversity index that accounts for abundance and evenness of species present in a given community using the formula H=−Σᵢ₌₁^{R}pᵢ ln pᵢ, where H is Shannon Diversity Index, R is the total number of species in the community, and pᵢ is the proportion of R made up of the ith species. Higher values indicate diverse and equally distributed communities, and a value of 0 indicates only one species is present in a given community. For further reference, see Shannon and Weaver, (1949) The mathematical theory of communication. The University of Illinois Press, Urbana. 117 pp.

[0068] As used herein, “antibiotic” refers to a substance that is used to treat and/or prevent bacterial infection by killing bacteria, inhibiting the growth of bacteria, or reducing the viability of bacteria.

[0069] Disclosed herein is a pharmaceutical composition that comprises a bacterial mixture comprising a bacterial isolate selected for inclusion in the pharmaceutical composition on the basis of a bile acid transforming ability. In an aspect, the bacterial isolate can be selected based on an ability to transform a primary bile acid to a secondary bile acid. In another aspect, the bacterial isolate can be selected based on an ability to transform a secondary bile acid to a different secondary bile acid. Throughout the disclosure bile acid transforming bacteria and bile acid metabolizing bacteria is used interchangeably.

[0070] Secondary bile acids are produced from primary bile acids in the guts of humans and other mammals solely due to the activity of microbes. In an aspect, “primary bile acid transforming bacteria” is in reference to bacteria, a consortium of fecal bacteria, bacterial taxa, bacterial clades or bacterial isolates or strains refers to one or more bacteria (e.g., in the form of one or more bacterial isolates or strains) capable of transforming a primary bile acid to a secondary bile acid. Without wishing to be bound by theory, primary bile acids are synthesized in the liver from cholesterol in a process that constitutes the major pathway for cholesterol degradation. After synthesis, bile acid is stored in the gallbladder and later secreted into the duodenum. Bile is important for emulsification of dietary lipids, digestion and absorption of fatty acids, cholesterol, fat-soluble vitamins, and other hydrophobic diet components. A majority of secreted bile acids are reabsorbed in the small intestine. Bile acids that are not absorbed in the small intestine migrate to the large intestine where they are normally metabolized by the microbiota, before being reabsorbed from the colon. Fiamoncini, J., The Cross Talk Between Bile Acids and intestinal Microbiota, Microbiome and Metabolome in Diagnosis, Therapy, and other Strategic Applications. (2019). Deoxycholic acid (DCA), lithocholic acid (LCA), and ursodeoxycholic acid (UDCA) are the most common secondary bile acids formed through bacterial metabolism of primary bile acid in the human intestines. For example, gut bacteria can perform C24 amide hydrolysis and 7α-dehydroxylation on primary bile acids, transforming the glycine and taurine conjugates of CA and CDCA into their corresponding secondary bile acids deoxycholic acid (DCA) and lithocholic acid (LCA), respectively. Although DCA and LCA are typically the most abundant secondary bile acids, ˜50 different secondary bile acids exist in human stool. Herein a secondary bile acid “corresponds to” a primary bile acid if the secondary bile acid can be produced from the primary bile acid via the metabolism of intestinal primary bile acid transforming bacteria. For example, the secondary bile acid DCA corresponds to the primary bile acid CA, and secondary bile acid LCA corresponds to the primary bile acid CDCA. Likewise, a first secondary bile acid “corresponds to” a second secondary bile acid if the second secondary bile acid can be produced from the first secondary bile acid via the metabolism of intestinal secondary bile acid converting bacteria. For example, the secondary bile acids IDCA, GDCA and TDCA correspond to the secondary bile acid DCA, and the secondary bile acids GLCA, TLCA and UDCA correspond to the secondary bile acid LCA.

[0071] In an aspect, the compositions disclosed herein provide for bile acid transformations in a subject administered the compositions as provided in Table 1.

TABLE 1

| | Secondary | |
|---|---|---|
| Primary Bile Acid | Bile Acid 1 | Secondary Bile Acid 2 |
| Cholic acid (CA) | Deoxycholic | Isodeoxycholic acid (IDCA) |
| | acid (DCA) | Glycodeoxycholic acid (GDCA) |
| | | Taurodeoxycholic acid (TDCA) |
| Chenodeoxycholic | Lithocholic | Glycolithocholic acid (GLCA) |
| acid (CDCA) | acid (LCA) | Taurolithocholic acid (TLCA) |
| | | Ursodeoxycholic acid (UDCA) |

[0072] In an aspect, primary bile acid transforming bacteria administered to a subject in a composition described herein convert the primary bile acid cholic acid to the secondary bile acid deoxycholic acid (DCA) and/or the primary bile acid chenodeoxycholic acid to the secondary bile acid lithocholic acid (LCA). In an aspect, secondary bile acid converting bacteria administered to a subject in a composition described herein convert the secondary bile acid DCA to one or more of the secondary bile acids isodeoxycholic acid (IDCA), glycodeoxycholic acid (GDCA) and/or taurodeoxycholic acid (TDCA). In an aspect, secondary bile acid converting bacteria administered to a subject in a composition described herein convert the secondary bile acid LCA to one or more of the secondary bile acids glycolithocholic acid (GLCA), taurolithocholic acid (TLCA), and/or usrodeoxycholic acid (UDCA). In certain aspects, the secondary bile acid converting bacteria can further convert UDCA to isoursodeoxycholic acid and/or glycoursodeoxycholic acid (GUDCA) and/or tauroursodeoxycholic acid (TUDCA).

[0073] In certain other aspects, primary acid transforming bacteria can transform the primary bile acid cholic acid to one or more of the secondary bile acids 12-oxoLCA, 3-oxoCA or 7-oxoDCA, and/or transform the primary bile acid CDCA to one or more of the secondary bile acids 3-oxoLCA, 3-oxoCDCA or 7-oxoLCA. In another aspect, secondary bile acid converting bacteria can convert the secondary bile acid LCA to 3-oxoLCA. In another aspect, secondary bile acid converting bacteria can convert the secondary bile acid 3-oxoLCA to one or more of the secondary bile acids isoLCA, isoalloLCA and/or 3-oxoalloLCA. In still another aspect, secondary bile acid bacteria can convert 3-oxoalloLCA to isoalloLCA or DCA to isoDCA.

[0074] In an aspect, the transformation of a primary bile acid to a secondary bile acid by primary bile acid transforming bacteria is mediated by one or more genes of the bile acid inducing (bai) gene cluster or operon (see FIG. 4A). In an aspect, this cluster of genes encodes seven enzymes and one transporter that carry out bile acid metabolism in gut bacteria capable of transforming a primary bile acid to a secondary bile acid. In an aspect, “bai gene” or “bai genes” refers to one or more of the following bile acid transforming pathway genes: baiB encoding a CoA ligase; baiCD encoding a 3-dehydro-4-7a oxidoreductase; baiE encoding a 7α-dehydratase; baiA1/A2 encoding a 3α-Hydroxysteroid Dehydrogenase; baiF encoding a coenzyme A (CoA) hydrolase; baiG encoding a bile acid transporter; baiH encoding a NADH:flavin oxidoreductase; and baiI encoding a ketosteroid isomerase. In an aspect, the bai genes are present in bacterial DNA in a cluster or operon (e.g., bile acid inducible operon); herein “bai operon” refers to a collection of genes capable of mediating the transformation of a primary to a secondary bile acid when activated and/or transcribed.

[0075] In an aspect, “secondary bile acid converting bacteria” in reference to bacteria, a consortium of fecal bacteria, bacterial taxa, bacterial clades or bacterial isolates refers to one or more bacterial (e.g., in the form of one or more bacterial isolates or strain) that encode an enzyme required for the metabolism of one secondary bile acid to a different secondary bile acid. In an aspect, the bioconversion of one secondary bile acid to a different secondary bile acid is a cooperative process in which multiple bacterial strains or species possess different genetic and/or enzymatic components of an overall metabolic pathway that converts a secondary bile acid to a different secondary bile acid. In such a case, individual cells harboring the genetic or metabolic capability for carrying out a particular step in the secondary bile acid transforming pathway would typically secrete the product of their metabolic step into the surrounding microbiota matrix, where such intermediate would be taken up by a different cell capable of performing the subsequent step(s) in the metabolic pathway.

[0076] The term “bile acid transforming bacteria” as used herein refers to both primary bile acid transforming bacteria and secondary bile acid converting bacteria. Without wishing to be bound by theory, bacterially produced bile acids can influence host physiology and health in a variety of ways. For example, in certain aspects secondary bile acids can be ligands for the farnesoid X receptor (FXR), the liver X receptor (LXR), the G-protein coupled receptor TGR5, and the vitamin D receptor, and thereby initiate a variety of signaling pathways relevant to hepatic and metabolic disorders. DCA production has further been shown to limit the outgrowth of the enteric pathogen Clostridium difficile, and UDCA protects against the development of chemically induced colon cancer in animal studies and can be used to treat gallstones.

[0077] The absence or low relative abundance of certain bile acid transforming bacteria in the intestinal microbiota of a subject relative to a healthy subject can result in a reduced abundance or rate of production of secondary bile acids, which can cause or exacerbate an intestinal dysbiosis in the subject. In an aspect, a subject in need of treatment with a pharmaceutical composition described herein may have a gut dysbiosis, and/or a disease, disorder or condition related to or arising from a gut dysbiosis, that is associated with a reduced concentration, amount or rate of production of one or more secondary bile acids in the intestine of the subject.

[0078] In an aspect, a subject in need of treatment with a composition described herein has a deficient intestinal concentration or rate of production of one or more secondary bile acids as a result of a reduced relative abundance of one or more bile acid transforming strains or species in the intestine of the subject relative to a healthy individual (e.g., one or more strains or species of primary bile acid transforming bacteria or secondary bile acid converting bacteria). For example, primary bile acid transforming bacteria may be deficient (e.g., reduced in relative abundance relative to an individual that does not have a gut dysbiosis) or absent in the intestine of a subject in need of treatment with a composition described herein. In another example, secondary bile acid converting bacteria required to catalyze a particular step in the overall metabolic pathway that converts one secondary bile acid to a different secondary bile acid may be deficient or absent in the intestine of a subject in need of treatment with a composition described herein. As a result of such deficiency in or absence of certain bile acid transforming bacteria (e.g., strain) in the intestine of a subject, such subject may exhibit a block or gap in bile acid metabolism that prevents the subject from producing one or more secondary bile acids beneficial to the health of the subject. The compositions described herein are designed to introduce into the gut of a patient the necessary metabolic potential to rescue the block or gap in bile acid metabolism, in the form of viable bile acid transforming bacteria.

[0079] In an aspect, the absence of a bile acid transforming bacterial clade in a microbiome of a subject can be considered a gene deletion that may be restored or corrected via gene therapy. In an aspect, gene therapy comprises cell therapy. In an aspect, gene therapy comprises the administration of a composition as described herein. In an aspect, gene therapy comprises the administration of a composition comprising bile acid transforming bacteria. In an aspect, gene therapy comprises the administration of a microbial therapeutic as described herein. In an aspect, gene therapy comprises the administration of a microbial therapeutic comprising bile acid transforming bacteria.

[0080] In an aspect, disclosed herein is a method comprising determining that a fecal microbiota of a subject comprises a number of clades of bacteria comprising a bai gene operon that is less than a threshold value, and administering to the subject a bacterial mixture comprising bacteria harboring the bai gene operon. In certain aspects, the subject cacks bacteria containing the bai gene operon. In certain aspects, such a “bai gene deletion” explains or is the cause of an intestinal-related pathology in the subject, for example a pathology that exhibits intestinal symptoms (e.g., inflammatory bowel disease), and administration of the bacteria comprising the bai gene operon is capable of treating the pathology. Therefore, the compositions and methods disclosed herein can be used as a precision medicine strategy that treats a patient deficient for a gene or gene module via microbial gene therapy to deliver the missing gene or gene module to the patient inside of viable bacteria. In an aspect, the viable bacteria administered to the subject have not been genetically engineered. In an aspect, the viable bacteria are capable of engrafting in the intestine of the subject, where they actively transform bile acids to produce secondary bile acids of use to the subject in alleviating the symptoms of the pathology caused by the “deletion” of the gene or gene module. Results demonstrating the success of this gene therapy approach are in FIG. 9, which shows that Crohn's disease patients who respond to treatment with an uncultured consortium of fecal bacteria (FMT) consistently show an increase in the abundance of the bai gene operon post-treatment compared to non-responders.

[0081] In an aspect, disclosed herein is a method comprising determining that a fecal microbiota of a subject comprises a number of clades of bacteria comprising isoalloLCA producing genes that is less than a threshold value, and administering to the subject a bacterial mixture comprising bacteria harboring the isoalloLCA producing genes. In an aspect, the isoalloLCA producing genes comprise one or more genes selected from the group consisting of a 5β-reductase, 5α-reductase, and 3β-hydroxy-delta5-C27-steroid dehydrogenase (3β-HSDH). In an aspect, bacteria harboring the isoalloLCA producing genes comprises bacteria from one or more genus selected from the group consisting of Bacteroides, Parabacteroides, Butyricimonas, Odoribacter, Porphyromonas, Alistipes, and a combination thereof. In an aspect, bacteria harboring the isoalloLCA producing genes comprises bacteria from one or more species selected from the group consisting of Bacteroides uniformis, Bacteroides finegoldii, Bacteroides fragilis, Bacteroides dorei, Bacteroides vulgatus, Bacteroides caccae, Bacteroides ovatus, Bacteroides eggerthii, Bacteroides thetaiotaomicron, Parabacteroides goldsteinii, Parabacteroides distasonis, Parabacteroides merdae, Butvricimonas synergistica, Odoribacter laneus, Porphyromonas somerae, Alistipes indistinctus, Alistipes onderdonkii, Alistipes finegoldii, and a combination thereof.

[0082] A deficiency in the amount or rate of production of one or more secondary bile acids produced in the intestine of a subject due to the deficiency or absence of certain bile acid transforming bacteria (e.g., primary bile acid transforming species or strain, or secondary bile acid converting species or strain) is to be distinguished from a reduced abundance of secondary bile acids arising directly from non-microbiota host factors. Examples of such non-microbiota factors include host-provided or host-encoded cellular components that impact the absorption, activity, rate of metabolism and/or downstream conversion of secondary bile acids produced by the microbiota. Disorders or conditions arising from variability in such host-provided mechanisms can thus be distinguished from intestinal dysbiosis and related disorders arising directly from a deficiency in the composition of the host microbiota, i.e., a deficiency in second bile acid production due to reduced relative abundance or activity of bile acid transforming bacteria. It is thus desirable to distinguish in practice between a situation where a patient is susceptible to or suffers from a condition or disorder due to a deficiency in bile acid transforming bacteria, and a patient whose disorder arises from a defect or deficiency in non-microbiota host-provided factors. The application of the methods disclosed herein provide for a means to identify patients or a patient population having deficiencies in the relative abundance or activity of intestinal bile acid transforming bacteria, thereby identifying such patient or patient population as a candidate likely to benefit from treatment with a composition comprising one or more bile acid transforming species or strain, for example administered as a bacterial mixture comprising a bacterial isolate capable of rescuing the microbiota-based bile acid transforming deficiency (e.g., due to the presence in such bacterial isolate of bai genes).

[0083] Accordingly, disclosed herein is a method of selecting a patient or patient population who may benefit from the introduction of bile acid transforming bacteria into the intestine, the method comprising identifying a deficiency in bile acid metabolism in the patient or patient population, and selecting the patient or patient population for treatment. As described further below, non-limiting means to identify a deficiency in bile acid metabolism that can be used as a basis to select subjects or populations of subjects as candidates to receive a treatment described herein include the absence or low relative abundance of bacterial clades comprising a bile acid metabolism consensus sequence; the production of a secondary bile acid (from a corresponding primary bile acid or a corresponding secondary bile acid) in a functional assay at a level or rate that is lower than a threshold level or rate (e.g., determined by measuring a ratio of the secondary to primary bile acids before and after the assay); the determination that a secondary bile acid is present in stool at a level lower than a threshold level, a primary bile acid is present in stool at a level higher than a threshold level, or a ratio of a secondary bile acid to a primary bile acid in stool is at a level lower than a threshold level; or a combination thereof.

[0084] In an aspect, a method of selecting a subject who may benefit from a treatment disclosed herein comprises screening a consortium of fecal bacteria (e.g., in the form of a fecal microbiota) for a deficiency in bile acid metabolism, and selecting the individual as the subject on the basis of determining that the consortium of fecal bacteria is deficient in bile acid metabolism. Herein “screening” a consortium of fecal bacteria for a deficiency in bile acid metabolism refers to the application or implementation of a test, assay or method (e.g., a computational method that analyzes metagenomics sequencing data) capable of quantifying or qualitatively describing a capacity of the consortium to transform a primary bile acid to a secondary bile acid or convert a secondary bile acid to a different secondary bile acid.

[0085] An example of a method that can identify or select a subject or population of subjects who may benefit from the treatments described herein comprises analyzing metagenomics data from a consortium of fecal bacteria of an individual for one or more bile acid metabolism consensus sequences (e.g., genes) known to mediate or be associated with one or more steps in a metabolic pathway that transforms a primary to a secondary bile acid or converts a first secondary bile acid to a second secondary bile acid. Herein the term “bile acid metabolism consensus sequence” refers to any nucleotide sequence (e.g., DNA sequence) that predicts and/or correlates with an ability of a bacterial strain, bacteria cell of a species, or clade comprising the consensus sequence to catalyze a step in a metabolic pathway that produces a secondary bile acid (i.e., from a primary bile acid or a secondary bile acid). In an aspect, such a bile acid metabolism consensus sequence is a DNA sequence comprising one or more genes or a regulatory region for one or more genes known to encode a product or products that act in a metabolic pathway functioning to transform a primary bile acid to a secondary bile acid. In an aspect, the bile acid metabolism consensus sequence is adjacent to a DNA sequence encoding a gene product that acts in a bile acid metabolic pathway. Herein “adjacent” refers to less than 100 bp, less than 200 bp, less than 300 bp, less than 400 bp, less than 500 bp, less than 1 kbp, less than 2 kbp, less than 3 kbp, less than 4 kbp, less than 5 kbp, less than 10 kbp, less than 15 kbp, less than 20 kbp, less than 30 kbp, less than 40 kbp, less than 50 kbp, or less than 100 kbp from the start of a gene encoding a product acting in a bile acid metabolic pathway. In an aspect, the consensus sequence comprises one or more bai genes or a regulatory region for one or more bai genes. In an aspect, the consensus sequence comprises at least one, at least two, at least three, at least four, at least five, at least six, at least seven, or at least eight bai genes. In an aspect, the consensus sequence comprises the bai operon. In an aspect, a bile acid metabolism consensus sequence does not encode a gene but associates with or is linked to or indicative of the presence of a gene or genes that produce one or more gene products that catalyze a step in a metabolic pathway that converts a primary bile acid to a secondary bile acid or a first secondary bile acid to a second secondary bile acid. In an aspect, a consensus sequence described herein includes all or a portion of a gene (e.g., 5β-reductase, 5α-reductase, 3β-HSDH, or a bai gene)

[0086] In another aspect, a bile acid metabolism consensus sequence refers to any amino acid sequence that predicts the ability of a bacterial strain, bacteria cell of a species or clade comprising the consensus sequence to catalyze a step in a metabolic pathway that produces a secondary bile acid (i.e., from a primary bile acid or a secondary bile acid). In another aspect, a bile acid metabolism consensus sequence refers to any amino acid sequence that correlates with an ability of a bacterial species, bacterial strain, or clade comprising the consensus sequence to catalyze a step in a metabolic pathway that produces a secondary bile acid (i.e., from a primary bile acid or a secondary bile acid). In another aspect, a bile acid metabolism consensus sequence comprises an amino acid sequence produced by one or more genes known to encode a product that acts in a metabolic pathway functioning to convert a first secondary bile acid to a second secondary bile acid. In an aspect, a bile acid consensus sequence comprises at least 7 amino acids, at least 20 amino acids, at least 40 amino acids, or at least 60 amino acids.

[0087] In an aspect, a bile acid metabolism consensus sequence comprises at least 20 bp, at least 30 bp, at least 40 bp, at least 50 bp, at least 100 bp, at least 200 bp, at least 300 bp, at least 400 bp, at least 500 bp, at least 1 kbp, at least 2 kbp, at least 3 kbp, at least 4 kbp, at least 5 kbp, at least 10 kbp, at least 20 kbp, at least 30 kbp, at least 40 kbp or at least 50 kbp. In an aspect, a bile acid metabolism consensus sequence comprises or consists of a sequence that is targeted by a primer in a PCR reaction, such that the addition of two primers produce a product in the PCR reaction.

[0088] In another aspect, a bile acid metabolism consensus sequence comprises a DNA sequence indicative of or comprising or adjacent to one or more genes or a regulatory region for one or more genes known to encode a product that acts in a metabolic pathway functioning to convert a first secondary bile acid to a second secondary bile acid. In an aspect, the bile acid metabolism consensus sequence is indicative of or comprises or is adjacent to a gene encoding 3α-hydroxysteroid dehydrogenase, which can convert the secondary bile acid LCA into the secondary bile acid 3-oxoLCA. In another aspect, the bile acid metabolism consensus sequence is indicative of or comprises or is adjacent to a gene encoding 3β-hydroxysteroid dehydrogenase, which can convert the secondary bile acid 3-oxoLCA into the secondary bile acid isoLCA. In still another aspect, the bile acid metabolism consensus sequence is indicative of or comprises or is adjacent to one or more genes selected from the group consisting of a 5β-reductase, 5α-reductase, and 3β-HSDH, which together can convert the secondary bile acid 3-oxoLCA to the secondary bile acid isoalloLCA. In an aspect, the bile acid metabolism consensus sequence comprises a cluster of genes comprising the 5β-reductase, 5α-reductase, and 3β-hydroxysteroid dehydrogenase, or portions thereof. In an aspect, the bile acid metabolism consensus sequence comprises a 5β-reductase gene or a portion thereof. In an aspect, the bile acid metabolism consensus sequence comprises a 5α-reductase gene or a portion thereof. In an aspect, the bile acid metabolism consensus sequence comprises a 3β-hydroxysteroid dehydrogenase gene or a portion thereof. In an aspect, a consensus sequence described herein includes all or a portion of a gene (e.g., 5β-reductase, 5α-reductase, 3β-HSDH, or a bai gene)

[0089] Disclosed herein is a method comprising determining that a consortium of fecal bacteria of an individual either lacks a particular bile acid metabolism consensus sequence or has a number of clades of bacteria comprising a bile acid metabolism sequence less than a threshold number of clades, and selecting such individual for a treatment described herein or as a candidate to benefit from a treatment described herein. Typically, the absence or deficient number of bacterial clades comprising a particular bile acid metabolism consensus sequence in the intestine of an individual correlates with or predicts a deficiency in the level of a secondary bile acid or the proportion or ratio of secondary bile acid to its corresponding primary or secondary bile acid. For example, individuals having 0 clades of bacteria comprising a bai gene operon show a ratio of DCA:CA of less than 1 (FIG. 5A) and a LCA:CDCA ratio of less than 1 (FIG. 5B), whereas a single bacterial clade comprising the operon in the intestine of a subject can be sufficient to normalize the DCA:CA ratio (FIG. 5A) and LCA:CDCA ratio (FIG. 5B) above 1, and two or more bacterial clades comprising a bai gene operon highly correlates with the correction of the deficiency in DCA:CA (FIG. 5A) and LCA:CDCA (FIG. 5B). In aspect, an absence or deficiency in the number of bacterial clades comprising bai genes or a bai gene operon correlates with a ratio of secondary bile acid to corresponding primary bile acid of less than 1 (e.g., DCA:CA<1 or LCA:CDCA <1.

[0090] It will be understood that different bile acid metabolism consensus sequences can mark or indicate different functions in the transformation from a primary to secondary bile acid or the conversion between two bile acids, and that an absence or reduction in number (below a threshold level) of different consensus sequences can lead to deficiencies in different secondary bile acids. For example, the absence or deficiency of intestinal bacteria comprising a consensus sequence that marks a functional bai operon encoding proteins (transporter and enzymes) necessary to convert CA to DCA is indicative of a microbiome-based error in metabolism manifested in deficient (or no) production of DCA in the gut, and a corresponding reduction in availability of secondary bile acids for the host. Such deficiency can be rescued or cured by introducing into the microbiome one or more bacterial strains, species or isolates that comprise a functional copy of the bai gene or genes that are missing (or an entire bai operon). Such introduction restores the gene products necessary to metabolize a bile acid substrate (in the case of DCA-producing genes, CA) thereby resolving the metabolic blockage and providing the host with the missing secondary bile acid (here DCA). In another aspect, a patient's microbiome may comprise sufficient primary bile acid transforming clades to convert primary bile acids, but a block in downstream secondary bile acid metabolism (e.g., indicated by an absence or reduced number of bacterial clades having a particular secondary bile acid metabolism consensus sequence) may result in an inability to convert a secondary bile acid to a different secondary bile acid. For example, the absence of a clade of bacteria comprising 3α-hydroxysteroid dehydrogenase can result in a deficiency in the secondary bile acid 3-oxoLCA and/or a decrease in the ratio of 3-oxoLCA:LCA. In another example, the absence of a clade of bacteria comprising 3β-hydroxysteroid dehydrogenase can result in a deficiency in the secondary bile acid isoLCA and/or a decrease in the ratio of isoLCA:3-oxoLCA. In still another example, the absence of a clade of bacteria comprising one or more of 5β-reductase, 5α-reductase and 3β-HSDH can result in a deficiency in the secondary bile acid isoalloLCA and/or a decrease in the ratio of isoalloLCA:3-oxoLCA.

[0091] Disclosed herein is a method of treating a variety of conditions, diseases and disorders related to a bile acid deficiency in a patient by complementing or rescuing a genetic defect in the microbiome of the patient that prevents the metabolism of a primary or secondary bile acid into a secondary bile acid product, thereby providing the host with the deficient secondary bile acid product. Such rescue of the bile acid deficient phenotype does not require genetic engineering. Instead, the methods herein advantageously provide for the absent or deficient metabolic activity by administering bacteria that naturally comprise a DNA sequence encoding a gene or gene products (or amino acid sequence produced by a gene) that are capable of performing the needed metabolic function. The administration of natural bacteria increases the probability that a particular administered species will successfully compete and/or engraft in the gut of the subject and thereby establish a threshold relative abundance necessary to take up the upstream bile acid substrate and provide the host with the missing or deficient product. Disclosed herein are compositions providing for bacteria that can restore a bile acid metabolism pathway at any step where function is missing. For example, a composition can provide for bacteria that provide transporter or enzyme activity to convert a first bile acid to a second bile acid, a first bile acid to a bile acid intermediate, a bile acid intermediate to a second bile acid, or a bile acid intermediate substrate to a bile acid intermediate product. In an aspect, a composition provides for bacteria comprising a gene encoding a transporter for importing a first bile acid or bile acid intermediate into the cell. In another aspect, a composition provides for bacteria comprising a gene encoding an exporter for exporting a second bile acid or a bile acid intermediate product out of the cell. In another aspect, a composition provides for bacteria comprising a gene encoding an enzyme that acts in a metabolic pathway that transforms a primary bile acid to a secondary bile acid, or a first secondary bile acid to a second secondary bile acid. In an aspect, a bacterial strain or species (e.g., administered in the context of a consortium of fecal bacteria) or a bacterial isolate administered to a patient comprises one or more genes encoding the following products to restore a deficiency in such product (e.g., in the event that a patient is determined to have a number of bacterial clades comprising a consensus sequence below a threshold value, where the consensus sequence is indicative of the presence of the gene or another gene acting in the same metabolic pathway): a CoA ligase (e.g., baiB gene function to restore a deficiency in primary bile acid transformation); 3-dehydro-4-7a oxidoreductase (e.g., baiCD gene function to restore a deficiency in primary bile acid transformation); 7α-dehydratase (e.g., baiE gene function to restore a deficiency in primary bile acid transformation); 3α-Hydroxysteroid Dehydrogenase (e.g., baiA1/A2 gene function to restore a deficiency in primary bile acid transformation); a coenzyme A (CoA) hydrolase (e.g., baiF gene function to restore a deficiency in primary bile acid transformation); a bile acid transporter (e.g., baiG gene function to restore a deficiency in primary bile acid transformation); NADH:flavin oxidoreductase (e.g., baiH gene function to restore a deficiency in primary bile acid transformation); and a ketosteroid isomerase 3α-hydroxysteroid dehydrogenase (e.g., baiI gene function to restore a deficiency in primary bile acid transformation), 3β-hydroxysteroid dehydrogenase to restore a deficiency in the metabolism of 3-oxoLCA to isoLCA; or one or more of 5β-reductase 5α-reductase or 3β-HSDH to restore a deficiency in the metabolism of 3-oxoLCA to isoalloLCA.

[0092] In an aspect, multiple bacterial strains or species (e.g., isolates) that provide for the same metabolic function are co-administered to a patient (e.g., in the same composition or separate compositions), thus conferring functional redundancy in the administered composition(s), in the event that one of the bacterial strains or species engrafts in the gut of the patient more efficiently or provides the missing or deficient metabolic function at a higher level in the context of the microbiome of a specific patient. In another aspect, multiple strains species of bacteria are administered to a patient to provide for different bile acid metabolic functions in the gut of the patient (e.g., one or more bacterial isolates comprising bai genes and/or one or more bacterial isolates comprising a gene encoding, e.g., 3β-hydroxysteroid dehydrogenase or one or more of 5β-reductase, 5α-reductase or 3β-HSDH). In an aspect, the bacterial strains, species or isolate includes bacteria from one or more genus of Clostridium, Bacillus, Bacteroides, Bifidobacterium, Catenibacterium, Collinsella, Eggerthella, Lachnospira, Lactobacillus, Parabacteroides, Peptoniphilus, Mediterraneibacter, Clostridium hiranonis, Clostridium hylemonae, Clostridium scindens, Ruminococcus gnavus, Coprococcus comes, Faecalibacterium prausnitzii, Eubacterium ventriosum, Bacteroides pectinophilus, Dorea formicigenerans, Eggerthela lenta, Parabacteroides merdae, Bacteroides dorei, Bacteroides vulgatus, and a combination thereof. In an aspect, the bacterial strains, species, or isolates include bacteria from one or more genus of Bacteroides, Parabacteroides, Butyricimonas, Odoribacter, Porphyromonas, Alistipes, or a combination thereof. In an aspect, the bacterial strains, species, or isolates include bacteria from one or more of Bacteroides uniformis, Bacteroides finegoldii, Bacteroides fragilis, Bacteroides dorei, Bacteroides vulgatus, Bacteroides caccae, Bacteroides ovatus, Bacteroides eggerthii, Bacteroides thetaiotaomicron, Parabacteroides goldsteinii, Parabacteroides distasonis, Parabacteroides merdae, Butyricimonas synergistica, Odoribacter laneus, Porphyromonas somerae, Alistipes indistinctus, Alistipes onderdonkii, Alistipes finegoldii, or a combination thereof.

[0093] In an aspect, a method of selecting a patient or a patient population that can benefit from a treatment described herein comprises subjecting a consortium of fecal bacteria of an individual to metagenomic sequencing, screening the metagenomic sequence for the presence of a bile acid metabolism consensus sequence associated with the transformation of a primary bile acid to a secondary bile acid or conversion between secondary bile acids, and selecting the individual as the subject on the basis of a determination that the consensus sequence is absent in the consortium of fecal bacteria or exists in a number of clades in the consortium that is below a threshold number (e.g., less than twenty bacterial clades, less than fifteen bacterial clades, less than ten bacterial clades, or less than five bacterial clades). In an aspect, an individual is selected for treatment with a composition described herein on the basis that no more than twenty, no more than nineteen, no more than eighteen, no more than seventeen, no more than sixteen, no more than fifteen, no more than fourteen, no more than thirteen, no more than twelve, no more than eleven, no more than ten, no more than nine no more than eight, no more than seven, no more than six, no more than five, no more than four, no more than three, no more than two, or no more than one bacterial clade in a fecal microbiota of the subject harbor a bai gene operon or one or more bai genes. In an aspect, a subject is selected for treatment with a composition described herein on the basis that no bacterial clades/no bacteria in a consortium of fecal bacteria of the subject harbor a bai gene operon or one or more bai genes.

[0094] In a different aspect, an individual can be selected by comparing the sequence identity of 16S rDNA sequences of known bile acid transforming bacteria to the 16S rDNA sequences identified from a consortium of fecal bacteria from a stool of the individual using metagenomics sequencing. A sequence identity of 100% or near 100% between a 16S rDNA sequence of a clade of bacteria of the consortium and the 16S rDNA sequence of a particular reference bile acid transforming bacteria (e.g., primary bile acid transforming or secondary bile acid converting bacteria) can be used a basis to determine that the individual's consortium of fecal bacteria comprises the respective type of bile acid transforming bacteria. In an aspect, an individual can be selected as a candidate to benefit from a treatment described herein on the basis of determining that a consortium of fecal bacteria from the individual does not comprise any clades having a 16S rDNA sequence with 100% sequence identity, at least 99.5% sequence identity, at least 99% sequence identity, at least 98% identity, at least 97% identity, at least 96% sequence identity or at least 95% sequence identity to a 16S rDNA sequence of a species known to comprise primary bile acid transforming bacteria or secondary bile acid converting bacteria. In another aspect, an individual can be selected as a candidate to benefit from a treatment described herein on the basis of determining that a consortium of fecal bacteria from the individual comprises no more than two clades, no more than three clades, no more than four clades, no more than five clades, no more than six clades, no more than seven clades, no more than eight clades, no more than nine clades, or no more than ten clades having a 16S rDNA sequence with 100% sequence identity, at least 99.5% sequence identity, at least 99% sequence identity, at least 98% identity, at least 97% identity, at least 96% sequence identity or at least 95% sequence identity to a 16S rDNA sequence of a strain or species known to comprise primary bile acid transforming bacteria or secondary bile acid converting bacteria.

[0095] In an aspect, an individual can be selected as a candidate to benefit from a treatment described herein on the basis of determining that a consortium of fecal bacteria from the individual does not comprise any clades having a sequence with 100% sequence identity, at least 99.5% sequence identity, at least 99% sequence identity, at least 98% identity, at least 97% identity, at least 96% sequence identity, at least 95% sequence identity, at least 94% sequence identity, at least 93% sequence identity, at least 92% sequence identity, at least 91% sequence identity, at least 90% sequence identity, at least 89% sequence identity, at least 88% sequence identity, at least 87% sequence identity, at least 86% sequence identity, at least 85% sequence identity to 1 or more, 2 or more, 3 or more, 5 or more, 10 or more, 20 or more, 30 or more, 40 or more, or 50 or more bile acid metabolism consensus sequences provided in SEQ ID NOs: 1-252. In another aspect, an individual selected as a candidate to benefit from a treatment described herein has no more than two clades, no more than three clades, no more than four clades, no more than five clades, no more than six clades, no more than seven clades, no more than eight clades, no more than nine clades, or no more than ten clades having an amino acid sequence with 100% sequence identity, at least 99.5% sequence identity, at least 99% sequence identity, at least 98% identity, at least 97% identity, at least 96% sequence identity, at least 95%, at least 94% sequence identity, at least 93% sequence identity, at least 92% sequence identity, at least 91% sequence identity, at least 90% sequence identity, at least 89% sequence identity, at least 88% sequence identity, at least 87% sequence identity, at least 86% sequence identity, at least 85% sequence identity to a bile acid metabolism consensus sequences provided in SEQ ID NOs: 1-252.

[0096] In another aspect, a bile acid metabolism consensus sequence identified from a consortium of fecal bacteria from a stool of a donor has a sequence identity of 100% or near 100% to one or more amino acid sequences provided in SEQ ID NOs: 1-252. In an aspect, fecal bacteria from a stool of a donor comprises at least 99.5% sequence identity, at least 99% sequence identity, at least 98% identity, at least 97% identity, at least 96% sequence identity, at least 95% sequence identity, at least 94% sequence identity, at least 93% sequence identity, at least 92% sequence identity, at least 91% sequence identity, at least 90% sequence identity, at least 89% sequence identity, at least 88% sequence identity, at least 87% sequence identity, at least 86% sequence identity, at least 85% sequence identity to a bile acid consensus sequence provided in SEQ ID NOs: 1-252. In another aspect, a consortium of fecal bacteria from a stool of a donor has more than two clades, more than three clades, more than four clades, more than five clades, more than six clades, more than seven clades, more than eight clades, more than nine clades, or more than ten clades having an amino acid sequence with 100% sequence identity, at least 99.5% sequence identity, at least 99% sequence identity, at least 98% identity, at least 97% identity, at least 96% sequence identity, at least 95%, at least 94% sequence identity, at least 93% sequence identity, at least 92% sequence identity, at least 91% sequence identity, at least 90,% sequence identity, at least 89% sequence identity, at least 88% sequence identity, at least 87% sequence identity, at least 86% sequence identity, at least 85% sequence identity to a bile acid metabolism consensus sequence provided in SEQ ID NOs: 1-252.

[0097] Another example of a method for identifying or selecting a subject or population of subjects who may benefit from a treatment described herein comprises determining a level or ratio of secondary bile acids produced in a functional assay that exposes fecal bacteria of an individual (e.g., in the form of a fecal microbiota, a consortium of fecal bacteria, or a bacterial isolate) to an appropriate metabolic substrate. In an aspect, such functional assay is an ex vivo functional assay that determines primary bile acid metabolism and comprises exposing the fecal bacteria to a primary bile acid substrate for a period of time and determining the rate of metabolism of the primary bile acid into its corresponding secondary bile acid (e.g., by determining a rate of reduction in level of the primary bile acid, a rate of increase in the level of the secondary bile acid, or a rate of change in ratio of the secondary:primary bile acids). In another aspect, the functional assay is an ex vivo functional assay that detects secondary bile acid metabolism and comprises exposing the fecal bacteria to a secondary bile acid substrate for a period of time and determining the rate of metabolism of a corresponding secondary bile acid (e.g., by determining a rate of reduction in a level of the substrate, a rate of increase in the level of the product, or a rate of change in a ratio of the product to substrate). Where the results of a functional assay determine that fecal bacteria of an individual produce a secondary bile acid at a level or rate that is below a threshold value, such individual can be selected as a candidate to potentially benefit from the treatments described herein. A further example of a method for identifying or selecting a subject or population of subjects who may benefit from a treatment described herein comprises determining a level of a primary and/or secondary bile acid in the stool of an individual. Where such quantification shows that one or more primary bile acids are present in the stool at a level or concentration that is higher than a threshold level or concentration, or one or more secondary bile acids are present in the stool at a level or concentration that is lower than a threshold level or concentration, such individual can be selected as a candidate to potentially benefit from the treatments described herein.

[0098] A subject who can benefit from treatment with a composition described herein can further be selected (e.g., in addition to or independently of a method of selection that employs a metagenomics comparison) on the basis of determining that a level of one or more secondary bile acids in a stool of the subject (or a ratio of one or more secondary bile acids to one or more primary bile acids in a stool of a subject) are below a threshold level, or determining that a rate of production of one or more secondary bile acids produced by fecal bacteria of a subject in a functional assay are below a threshold level. For example, raw stool or processed stool can be subjected to a screen or assay to quantify one or more primary and/or secondary bile acids of interest in the stool, and the subject can then be selected for treatment with a composition described herein if the primary bile acid(s) is above a threshold level, the secondary bile acid(s) is below a threshold level, or a ratio of the secondary to primary bile acids is below a threshold level. In another example, fecal bacteria (e.g., in the form of a fecal microbiota, consortium of fecal bacteria, or a bacterial isolate) from the stool of a subject can be subjected to a functional screen, assay or test, for example an “ex vivo” functional screen, assay or test, to determine the capacity of the bacteria to transform a primary bile acid to a corresponding secondary bile acid, or to convert a secondary bile acid to a corresponding secondary bile acid, and the subject can be selected for treatment with a composition described herein if a rate of transformation or conversion of the bile acid substrate to its corresponding secondary bile acid is below a threshold level.

[0099] The detection or measurement of primary or secondary bile acids (e.g., directly from stool or in a functional assay) can be by any method. For example, in an aspect, primary or secondary bile acids are detected or measured using chromatography, e.g., thin-layer chromatography (TLC) and/or liquid chromatography (e.g., ultra-performance liquid chromatography), for example in combination with mass spectrometry (e.g., TLC-MS or UPLC-MS. In another aspect, bile acids can be quantified or profiled using metabolomics techniques.

[0100] In an aspect, a functional assay comprises exposing fecal bacteria of a subject (e.g., a consortium of fecal bacteria) to a primary bile acid for a period of time (e.g., at least 1 at least 2, at least 3, at least 4, at least 5, at least 6, at least 7, at least 8, at least 9, at least 10, at least 11, at least 12, at least 13, at least 14, at least 15, at least 16, at least 17, at least 18, at least 19, at least 20, at least 21, at least 22, at least 23, at least 24 at least 30, at least 36 hours, at least 42 hours, at least 48, at least 54, at least 60, or greater than 60 hours) and determining the rate of conversion of the primary bile acid to its corresponding bile acid. In an aspect, the primary bile acid is CA and the secondary bile acid is DCA. In another aspect, the primary bile acid is CDCA and the secondary bile acid is LCA. In various aspects, a determination of the rate of conversion or transformation comprises (i) comparing the level of primary bile acid substrate at the beginning and end of the assay, (ii) determining a level of secondary bile acid at the end of the assay, and/or comparing a ratio of the secondary bile acid to the primary bile acid at the beginning and end of the assay. In an aspect, a subject can benefit from treatment or can be selected for treatment on the basis that a ratio of secondary to primary bile acids existing at the end of the functional assay (e.g., during a period of less than 24 hours or less than 12 hours) is less than 1. In another aspect, a subject can benefit from treatment or can be selected for treatment on the basis that a ratio of secondary to primary bile acids existing at the end of the functional assay (e.g., during a period of less than 24 hours or less than 12 hours) is less than 0.5. In another aspect, a subject can benefit from treatment or can be selected for treatment on the basis that a ratio of secondary to primary bile acids existing at the end of the functional assay (e.g., during a period of less than 24 hours or less than 12 hours) is less than 2, less than 1.9, less than 1.8, less than 1.7, less than 1.6, less than 1.5, less than 1.4, less than 1.3, less than 1.2, less than 1.1, less than 1, less than 0.9, less than 0.8, less than 0.7, less than 0.6, less than 0.5, less than 0.4, less than 0.3, less than 0.2 or less than 0.1.

[0101] In an aspect, a subject is selected as potentially benefiting from administration with a composition described herein, or for treatment with a composition described herein, based on determining that a level or concentration of at least one secondary bile acid in a stool of the subject or arising from a functional assay (or a ratio of a secondary to primary bile acid in a stool or arising from a functional assay) is lower than a threshold level, wherein the secondary bile acid is selected from the group consisting of deoxycholic acid (DCA), isodeoxycholic acid, glycodeoxycholic acid (GDCA), taurodeoxycholic acid (TDCA), glycolithocholic acid (GLCA), taurolithocholic acid (TLCA), lithocholic acid (LCA), ursodeoxycholic acid (UDCA), isoursodeoxycholic acid, glycoursodeoxycholic acid (GUDCA), tauroursodeoxycholic acid (TUDCA) or a combination thereof.

[0102] In an aspect, a subject is selected for treatment or as potentially benefitting from treatment on the basis of a ratio of total secondary bile acids to total primary bile acids in a stool being lower than a threshold value. In an aspect, the subject is selected if the ratio of total secondary bile acids to total primary bile acids is less than 2, less than 1.9, less than 1.8, less than 1.7, less than 1.6, less than 1.5, less than 1.4, less than 1.3, less than 1.2, less than 1.1, less than 1, less than 0.9, less than 0.8, less than 0.7, less than 0.6, less than 0.5, less than 0.4, less than 0.3, less than 0.2 or less than 0.1.

[0103] In another aspect, a subject is selected for treatment or as potentially benefitting from treatment if the ratio of a secondary bile acid to its corresponding primary bile acid in a stool of the subject is less than a threshold value. In an aspect, the ratio of secondary bile acid to primary bile acid is selected from the group consisting of DCA:CA, LCA:CDCA, 12-oxoLCA:CA, 3-oxoCA:CA, 7-oxoDCA:CA, 3-oxoLCA:CDCA, 7-oxoLCA:CDCA, and a combination thereof. In an aspect, the subject is selected if the ratio of the secondary bile acid to its corresponding primary bile acid in a stool of the subject is less than 2, less than 1.9, less than 1.8, less than 1.7, less than 1.6, less than 1.5, less than 1.4, less than 1.3, less than 1.2, less than 1.1, less than 1, less than 0.9, less than 0.8, less than 0.7, less than 0.6, less than 0.5, less than 0.4, less than 0.3, less than 0.2 or less than 0.1.

[0104] In a further aspect, a subject is selected for treatment or as potentially benefitting from treatment if the ratio of a second secondary bile acid to a first secondary bile acid in a stool of the subject is less than a threshold value. In an aspect, the ratio of second secondary bile acid to first secondary bile acid is selected from the group consisting of IDCA:DCA, GDCA:DCA, TDCA:DCA, GLCA:LCA, TLCA:LCA, UDCA:LCA, isoLCA:3-oxoLCA, isoalloLCA:3-oxoLCA, 3-oxoalloLCA:3-oxoLCA, or a combination thereof. In an aspect, the subject is selected if the ratio of the secondary bile acid to its corresponding primary bile acid in a stool of the subject is less than 2, less than 1.9, less than 1.8, less than 1.7, less than 1.6, less than 1.5, less than 1.4, less than 1.3, less than 1.2, less than 1.1, less than 1, less than 0.9, less than 0.8, less than 0.7, less than 0.6, less than 0.5, less than 0.4, less than 0.3, less than 0.2 or less than 0.1.

[0105] In an aspect the at least one secondary bile acid is deoxycholic acid (DCA), and a subject is selected based on a level of DCA (e.g., in a stool of the subject or arising from a bile acid transforming functional assay incorporating fecal bacteria of the subject and a bile acid substrate, e.g., cholic acid) that is lower than a threshold level of DCA, wherein the threshold level is 5 μM, 10 μM, 15 μM, 20 μM, 30 μM, 40 μM, 50 μM, 60 μM, 70 μM, 80 μM, 90 μM, 100 μM, 120 μM, 140 μM, 150 μM, 170 μM, 200 μM, 300 μM, 350 μM, 400 μM, 450 μM, or 500 μM. In another aspect, the threshold level of DCA is between 5 μM and 20 μM, 5 μM and 50 μM, 5 μM and 100 μM, and 5 μM and 150 μM, 5 μM and 200 μM, 5 μM and 800 μM, 10 μM and 20 μM, 10 μM and 50 μM, 10 μM and 100 μM, 10 μM and 150 μM, 10 μM and 200 μM, 50 μM and 100 μM, 50 μM and 200 μM, 100 μM and 200 μM, 200 μM and 400 μM, 200 μM and 600 μM, 400 μM and 800 μM, or 200 μM and 800 μM.

[0106] In another aspect, the at least one secondary bile acid is glycodeoxycholic acid (GDCA), and a subject is selected as potentially benefitting from a treatment described herein based on a level of GDCA (e.g., in a stool of the subject or arising from a bile acid transforming functional assay incorporating fecal bacteria of the subject and a bile acid substrate, e.g. DCA) that is lower than a threshold level of GDCA, wherein the threshold level is 5 μM, 10 μM, 15 μM, 20 μM, 30 μM, 40 μM, 50 μM, 60 μM, 70 μM, 80 μM, 90 μM, 100 μM, 120 μM, 140 μM, 150 μM, 170 μM, or 200 μM. In another aspect, the threshold level of GDCA is between 5 μM and 20 μM, 5 μM and 50 μM, 5 μM and 100 μM, and 5 μM and 150 μM, 5 μM and 200 μM, 5 μM and 800 μM, 10 μM and 20 μM, 10 μM and 50 μM, 10 μM and 100 μM, 10 μM and 150 μM, 10 μM and 200 μM, 50 μM and 100 μM, 50 μM and 200 μM, 100 μM and 200 μM, or 200 μM and 800 μM.

[0107] In another aspect, the at least one secondary bile acid is taurodeoxycholic acid (TDCA), and a subject is selected as potentially benefitting from a treatment described herein based on a level of TDCA (e.g., in a stool of the subject or arising from a bile acid transforming functional assay incorporating fecal bacteria of the subject and a bile acid substrate, e.g., DCA) that is lower than a threshold level of TDCA, wherein the threshold level is 5 μM, 10 μM, 15 μM, 20 μM, 30 μM, 40 μM, 50 μM, 60 μM, 70 μM, 80 μM, 90 μM, 100 μM, 120 μM, 140 μM, 150 μM, 170 μM, or 200 μM. In another aspect, the threshold level of TDCA is between 5 μM and 20 μM, 5 μM and 50 μM, 5 μM and 100 μM, and 5 μM and 150 μM, 5 μM and 200 μM, 5 μM and 800 μM, 10 μM and 20 μM, 10 μM and 50 μM, 10 μM and 100 μM, 10 μM and 150 μM, 10 μM and 200 μM, 50 μM and 100 μM, 50 μM and 200 μM, 100 μM and 200 μM, or 200 μM and 800 μM.

[0108] In another aspect, the at least one secondary bile acid is glycolithocholic acid (GLCA), and a subject is selected as potentially benefitting from a treatment described herein based on a level of GLCA (e.g., in a stool of the subject or arising from a bile acid transforming functional assay incorporating fecal bacteria of the subject and a bile acid substrate, e.g., LCA) that is lower than a threshold level of GLCA, wherein the threshold level is 5 μM, 10 μM, 15 μM, 20 μM, 30 μM, 40 μM, 50 μM, 60 μM, 70 μM, 80 μM, 90 μM, 100 μM, 120 μM, 140 μM, 150 μM, 170 μM, or 200 μM. In another aspect, the threshold level of GLCA is between 5 μM and 20 μM, 5 μM and 50 μM, 5 μM and 100 μM, and 5 μM and 150 μM, 5 μM and 200 μM, 5 μM and 800 μM, 10 μM and 20 μM, 10 μM and 50 μM, 10 μM and 100 μM, 10 μM and 150 μM, 10 μM and 200 μM, 50 μM and 100 μM, 50 μM and 200 μM, 100 μM and 200 μM, or 200 μM and 800 μM.

[0109] In another aspect, the at least one secondary bile acid is lithocholic acid (LCA), and a subject is selected as potentially benefitting from a treatment described herein based on a level of LCA (e.g., in a stool of the subject or arising from a bile acid transforming functional assay incorporating fecal bacteria of the subject and a bile acid substrate, e.g., chenodeoxycholic acid) that is lower than a threshold level of LCA, wherein the threshold level is 5 μM, 10 μM, 15 μM, 20 μM, 30 μM, 40 μM, 50 μM, 60 μM, 70 μM, 80 μM, 90 μM, 100 μM, 120 μM, 140 μM, 150 μM, 170 μM, or 200 μM. In another aspect, the threshold level of LCA is between 5 μM and 20 μM, 5 μM and 50 μM, 5 μM and 100 μM, and 5 μM and 150 μM, 5 μM and 200 μM, 5 μM and 800 μM, 10 μM and 20 μM, 10 μM and 50M, 10 μM and 100 μM, 10 μM and 150 μM, 10 μM and 200 μM, 50 μM and 100 μM, 50 μM and 200 μM, 100 μM and 200 μM, or 200 μM and 800 μM. In another aspect, the threshold level of is at least 800 μM, at least 1000 μM, at least 1200 μM, at least 1400 μM, at least 1600 μM, at least 1800 μM, at least 2000 μM, or greater than 2000 μM.

[0110] In another aspect, the at least one secondary bile acid is isoalloLCA, and a subject is selected as potentially benefitting from a treatment described herein based on a level of isoalloLCA (e.g., in a stool of the subject or arising from a bile acid transforming functional assay incorporating fecal bacteria of the subject and a bile acid substrate, e.g., chenodeoxycholic acid) that is lower than a threshold level of isoalloLCA, wherein the threshold level is 5 μM, 10 μM, 15 μM, 20 μM, 30 μM, 40 μM, 50 μM, 60 μM, 70 μM, 80 μM, 90 μM, 100 μM, 120 μM, 140 μM, 150 μM, 170 μM, or 200 μM. In another aspect, the threshold level of isoalloLCA is between 5 μM and 20 μM, 5 μM and 50 μM, 5 μM and 100 μM, and 5 μM and 150 μM, 5 μM and 200 μM, 5 μM and 800 μM, 10 μM and 20 μM, 10 μM and 50 μM, 10 μM and 100 μM, 10 μM and 150 μM, 10 μM and 200 μM, 50 μM and 100 μM, 50 μM and 200 μM, 100 μM and 200 μM, or 200 μM and 800 μM. In another aspect, the threshold level of is at least 800 μM, at least 1000 μM, at least 1200 μM, at least 1400 μM, at least 1600 μM, at least 1800 μM, at least 2000 μM, or greater than 2000 μM.

[0111] In another aspect, the at least one secondary bile acid is ursodeoxycholic acid (UDCA), and a subject is selected as potentially benefitting from a treatment described herein based on a level of UDCA (e.g., in a stool of the subject or arising from a bile acid transforming functional assay incorporating fecal bacteria of the subject and a bile acid substrate, e.g., LCA) that is lower than a threshold level of UDCA, wherein the threshold level is 5 μM, 10 μM, 15 μM, 20 μM, 30 μM, 40 μM, 50 μM, 60 μM, 70 μM, 80 μM, 90 μM, 100 μM, 120 μM, 140 μM, 150 μM, 170 μM, or 200 μM. In another aspect, the threshold level of UDCA is between 5 μM and 20 μM, 5 μM and 50 μM, 5 μM and 100 μM, and 5 μM and 150 μM, 5 μM and 200 μM, 5 μM and 800 μM, 10 μM and 20 μM, 10 μM and 50 μM, 10 μM and 100 μM, 10 μM and 150 μM, 10 μM and 200 μM, 50 μM and 100 μM, 50 μM and 200 μM, 100 μM and 200 μM, or 200 μM and 800 μM.

[0112] In another aspect, the at least one secondary bile acid is glycoursodeoxycholic acid (GUDCA), and a subject is selected as potentially benefitting from a treatment described herein based on a level of GUDCA (e.g., in a stool of the subject or arising from a bile acid transforming functional assay incorporating fecal bacteria of the subject and a bile acid substrate, e.g., UDCA) that is lower than a threshold level of GUDCA, wherein the threshold level is 5 μM, 10 μM, 15 μM, 20 μM, 30 μM, 40 μM, 50 μM, 60 μM, 70 μM, 80 μM, 90 μM, 100 μM, 120 μM, 140 μM, 150 μM, 170 μM, or 200 μM. In another aspect, the threshold level of UDCA is between 5 μM and 20 μM, 5 μM and 50 μM, 5 μM and 100 μM, and 5 μM and 150 μM, 5 μM and 200 μM, 5 μM and 800 μM, 10 μM and 20 μM, 10 μM and 50 μM, 10 μM and 100 μM, 10 μM and 150 μM, 10 μM and 200 μM, 50 μM and 100 μM, 50 μM and 200 μM, 100 μM and 200 μM, or 200 μM and 800 μM.

[0113] In another aspect, the at least one secondary bile acid is tauroursodeoxycholic acid (TUDCA), and a subject is selected as potentially benefitting from a treatment described herein based on a level of TUDCA (e.g., in a stool of the subject or arising from a bile acid transforming functional assay incorporating fecal bacteria of the subject and a bile acid substrate, e.g., UDCA) that is lower than a threshold level of TUDCA, wherein the threshold level is 5 μM, 10 μM, 15 μM, 20 μM, 30 μM, 40 μM, 50 μM, 60 μM, 70 μM, 80 μM, 90 μM, 100 μM, 120 μM, 140 μM, 150 μM, 170 μM, or 200 μM. In another aspect, the threshold level of TUDCA is between 5 μM and 20 μM, 5 μM and 50 μM, 5 μM and 100 μM, and 5 μM and 150 μM, 5 μM and 200 μM, 5 μM and 800 μM, 10 μM and 20 μM, 10 μM and 50 μM, 10 μM and 100 μM, 10 μM and 150 μM, 10 μM and 200 μM, 50 μM and 100 μM, 50 μM and 200 μM, 100 μM and 200 μM, or 200 μM and 800 μM.

[0114] A subject can further be selected as potentially benefitting from administration of a composition described herein based on a level of one or more primary bile acids in a stool of the subject being above a threshold level. An elevated level of one or more primary bile acids in a stool may be indicative of a deficiency in the ability of fecal bacteria of the subject to utilize the pool of intestinal primary bile acids as a substrate to generate secondary bile acids. In an aspect, a subject is selected on the basis of a level of a primary bile acid that is greater than a threshold level, wherein the primary bile acid is selected from the group consisting of cholic acid (CA) and chenodeoxycholic acid (CDCA) and a combination thereof. In an aspect the threshold level is greater than 1 mM of a primary bile acid. In another aspect, the threshold level is 1 mM, 950 μM, 900 μM, 850 μM, 800 μM, 750 μM, 700 μM, 650 μM, 600 μM, 550 μM, 500 μM, 450 μM, 400 μM, 350 μM, 300 μM, 250 μM, 200 μM, 150 μM, 100 μM, or 50 μM of a primary bile acid.

[0115] Disclosed herein is a pharmaceutical composition comprising a bacterial mixture that comprises one or more bacterial isolates that comprise primary bile acid transforming bacteria, secondary bile acid converting bacteria, or a combination thereof. In an aspect, a bacterial mixture comprises at least one, at least two, at least three, at least four, at least five, at least six, at least seven, at least eight, at least nine, at least ten, at least eleven, at least twelve, at least thirteen, at least fourteen, at least fifteen, at least sixteen, at least seventeen, at least eighteen, at least nineteen, at least twenty, or greater than twenty bacterial isolates. In an aspect, administration of a pharmaceutical composition comprising the bacterial mixture to a subject in need thereof rescues a deficiency in bile acid metabolism as a result of the introduction and/or engraftment of one or more of the bacterial isolates/strain or species into the subject's intestinal microbiota and subsequent production of secondary bile acids by the introduced bacterial isolates/strain or species (e.g., by the transformation of primary into secondary bile acids or the conversion of a secondary bile acid to a different secondary bile acid). In aspects, a pharmaceutical composition comprises a plurality of primary bile acid transforming bacterial isolates or a plurality of secondary bile acid converting bacteria to provide for functional redundancy in the composition in the event that a particular bacterial isolate is unable to engraft or engrafts at a reduced efficiency in the intestine of the subject administered the composition.

[0116] In an aspect, a bacterial isolate can be selected for inclusion in a pharmaceutical composition described herein based on an ability of such bacterial isolate to correct a deficiency in secondary bile acid metabolism of a subject administered the composition. For example, such bacterial isolate can comprise one or more bai genes, a bai operon or one or more genes capable of mediating a metabolic step in the conversion between secondary bile acids.

[0117] In an aspect, a bacterial isolate can be selected for inclusion in a pharmaceutical composition described herein based on the determination that such bacterial isolate corresponds to a bacterial clade having a relative abundance in a patient or population of patients following administration of fecal microbiota transplantation (FMT) therapy that correlates with the rescue of a bile acid metabolic deficiency in the patient or patient population. For example, a bacterial isolate can be selected for inclusion in a composition on the basis that a bacterial clade corresponding to the bacterial isolate comprises one or more bile acid metabolism consensus sequences (e.g., all or a portion of one or more bai genes or a bai operon) and is undetectable in the fecal microbiota of a patient or group of patients prior to administration of an FMT, but present in the fecal microbiota of the patient or group of patients following the FMT. In another example, the bacterial clade can be present in a patient or group of patients prior to an FMT, but increase in relative abundance in the patient or group of patients following the FMT. In an aspect, a bacterial isolate is selected for inclusion in a composition on the basis that a corresponding bacterial clade in a patient following an FMT comprises a bile acid metabolism consensus sequence, and the relative abundance of the corresponding bacterial clade increases in at least one patient, at least two patients, at least three patients, at least four patients, at least five patients, at least six patients, at least seven patients, at least eight patients, at least nine patients, at least ten patients, at least fifteen patients, at least twenty patients, at least twenty five patients, at least thirty patients, at least thirty five patients, at least forty patients, at least forty five patients, at least fifty patients, or more than fifty patients following administration of FMT to treat a disorder in the group of patients. Herein a bacterial isolate “corresponds to” a bacterial clade in a consortium of fecal bacteria (e.g., in the form of a fecal microbiota) where respective 16S rDNA of the bacterial isolate and bacterial clade share at least 95%, at least 96%, at least 97%, at least 98%, at least 99%, at least 99.5%, or 100% sequence identity. The bacterial isolate corresponding to a bacterial clade that rescues the bile acid metabolism deficiency in a patient further comprises the bile acid consensus sequence present in the bacterial clade. Examples of disorders that can be treated with FMT to introduce or increase the relative abundance of a bile acid transforming bacterial clade include C. difficile infection, inflammatory bowel disease, ulcerative colitis, Crohn's disease, an autism spectrum disorder, obesity, chronic fatigue syndrome, hepatic encephalopathy, nonalcoholic steatohepatitis (NASH), a hepatitis B virus infection, primary sclerosing cholangitis (PSC), Parkinson's disease and multiple sclerosis.

[0118] In another aspect, a bacterial isolate can be selected for inclusion in a pharmaceutical composition described herein based on a determination that the bacterial isolate corresponds to a bacterial clade that has an increased relative abundance in a population of subjects that do not have or are in remission from a disease or disorder associated with a deficiency in bile acid metabolism. For example, a bacterial isolate comprising bile acid transforming bacteria (e.g., species or strain harboring a bai operon) can be selected on the basis that it corresponds to a bacterial clade in a population of subjects in remission from a disease or disorder but is not present or is present in a reduced relative abundance in an intestinal microbiota of a patient population. A patient or patient population used for the comparison can have any disorder associated with a deficiency in bile acid metabolism, including but not limited to C. difficile infection, inflammatory bowel disease, ulcerative colitis, Crohn's disease, an autism spectrum disorder, obesity, chronic fatigue syndrome, hepatic encephalopathy, nonalcoholic steatohepatitis (NASH), a hepatitis B virus infection, primary sclerosing cholangitis (PSC), Parkinson's disease and multiple sclerosis.

[0119] Following the selection of a bacteria isolate on the basis of a genetic correspondence with a bacterial clade (e.g., sharing at least 95%, at least 96%, at least 97%, at least 98%, at least 99%, at least 99.5% or 100% identity of 16SrDNA sequences) determined to be present in a microbiome of a subject or population of subjects at an increased relative abundance following FMT or compared to a patient population having a disorder or condition associated with a deficiency in bile acid metabolism, such bacterial isolate can be directly selected for inclusion in a bacterial mixture or subjected to further analyses, tests or assays that confirm its ability to treat a bile acid metabolism deficiency in a patient. For example, the DNA of the bacterial isolate can be assessed for the existence of bile acid metabolism consensus sequences that mediate or associate with either primary bile acid transformation or secondary bile acid conversion. Alternatively, or in addition, the bacterial isolate can be subjected to one or more “wet” assays such as quantifying the rate of secondary bile acid production (e.g., by exposing the isolate to a substrate comprising either a primary bile acid or a secondary bile acid), either alone or in combination with other strains or species of bacteria. The results of such analyses and assays can be used as a further basis for selecting such bacterial isolate for inclusion in a composition.

[0120] In an aspect, a bacterial isolate can be obtained from a laboratory stock or a bacterial cell bank archiving bacterial strain or species originally isolated from a stool of a human donor. For example, a consortium of fecal bacteria can be the source of a bacterial isolate incorporated into a bacterial mixture described herein. In certain aspects, a consortium of fecal bacteria can be cultured on a solid media substrate and one or more bacterial isolates selected as single colonies. In other aspects, a consortium of fecal bacteria can be added to liquid media to produce a mixed bacterial culture that is then serially diluted to produce a culture of the bacterial isolate expanded from a single cell. In aspects, a bacterial isolate can be cultured (e.g., in solid or liquid media) using known techniques. Methods for isolating, purifying, and/or culturing bacterial strain or species are described in Sadowsky et al., WO 2012/122478 and in Borody et al., WO 2012/016287, each of which is incorporated herein by reference.

[0121] In certain aspects, a pharmaceutical composition comprises a bacterial isolate capable of transforming a primary bile acid to a secondary bile acid. For example, the bacterial isolate can comprise one or more bai genes or a bai operon. In certain instances, a bacterial composition can comprise one or more primary bile acid transforming bacteria (e.g., bacterial strain) in the form of a bacterial isolate that is selected from the group consisting of Clostridium, Bacillus, Bacteroides, Bifidobacterium, Catenibacterium, Collinsella, Eggerthella, Lachnospira, Lactobacillus, Parabacteroides, Peptoniphilus, Mediterraneibacter, Clostridium hiranonis, Clostridium hylemonae, Clostridium scindens, Ruminococcus gnavus, Coprococcus comes, Faecalibacterium prausnitzii, Eubacterium ventriosum, Bacteroides pectinophilus, Dorea formicigenerans, Eggerthela lenta, Parabacteroides merdae, Bacteroides dorei, Bacteroides vulgatus, and a combination thereof.

[0122] In certain aspects, a pharmaceutical composition comprises a bacterial isolate comprising one or more bacteria that is a member of a taxonomical group selected from the group consisting of Bacteroides, Parabacteroides, Butyricimonas, Odoribacter, Porphyromonas, Alistipes, and a combination thereof. In certain aspects, a pharmaceutical composition comprises a bacterial isolate comprising one or more bacteria that is a member of a taxonomical group selected from the group consisting of Bacteroides uniformis, Bacteroides finegoldii, Bacteroides fragilis, Bacteroides dorei, Bacteroides vulgatus, Bacteroides caccae, Bacteroides ovatus, Bacteroides eggerthii, Bacteroides thetaiotaomicron, Parabacteroides goldsteinii, Parabacteroides distasonis, Parabacteroides merdae, Butyricimonas synergistica, Odoribacter laneus, Porphyromonas somerae, Alistipes indistinctus, Alistipes onderdonkii, Alistipes finegoldii, and a combination thereof.

[0123] In another aspect of the present disclosure, a bacterial mixture comprises a bacterial isolate comprising one or more bile acid transforming bacteria (either primary bile acid transforming bacteria or secondary bile acid transforming bacteria) that is a member of a taxonomical group selected from the group consisting of Firmicutes, Bacteroidetes, Clostridia, Clostridiales, Clostridiaceae, Lachnospiraceae, Ruminococcaceae, Bacteroidacaeae, Porphyromonadaceae, Prevotellaceae, Eubacterium, Clostridium, Fiaecalibacterium, Roseburia, Butyrivibrio, Blautia, Anaerostipes, Coprococcus, Subdoligranulum, Anaerotruncus, Ruminococcus, Clostridium hiranonis, Clostridium hylemonae, Clostridium scindenrs, Ruminococcus gnavus, Coprococcus comes, Faecalibacterium prausnitzii, Eubacterium ventriosum, Bacteroides pectinophilus, Dorea formicigenerans, Clostridium perfringens, Eubacterium lentum, Eubacterium rectale, Blautia producta, Roseburia intestinalis, Roseburia faecis, Roseburia hominis, Roseburia inulinivorans, Roseburia cecicola, Butyrivibrio fibrisolvens, Eubacterium ramulus, Eubacterium hallii, Eubacterium ruminantium, Eubacterium cylindroides, Eubacterium oxidoreducens, Coprococcus catus, Coprococcus eutactus, Coprococcus comes, Faecalibacterium prausnitzii, Subdoligranulum variabile, Anaerotruncus colihominis, Clostridium nexile, Clostridium hathewayi, Clostridium indolis, Clostridium leptum, Ruminococcus gnavus, Ruminococcus obeum, and Anaerostipes caccae.

[0124] In another aspect of the present disclosure, a bacterial mixture comprises a bacterial isolate comprising one or more bacteria that is a member of a taxonomical group selected from the group consisting of Bacteroides, Parabacteroides, Butyricimonas, Odoribacter, Porphyromonas, Alistipes, and a combination thereof. In another aspect of the present disclosure, a bacterial mixture comprises a bacterial isolate comprising one or more bacteria that is a member of a taxonomical group selected from the group consisting of Bacteroides uniformis, Bacteroides finegoldii, Bacteroides fragilis, Bacteroides dorei, Bacteroides vulgatus, Bacteroides caccae, Bacteroides ovatus, Bacteroides eggerthii, Bacteroides thetaiotaomicron, Parabacteroides goldsteinii, Parabacteroides distasonis, Parabacteroides merdae, Butyricimonas synergistica, Odoribacter laneus, Porphyromonas somerae, Alistipes indistinctus, Alistipes onderdonkii, Alistipes finegoldii, and a combination thereof.

[0125] As described herein, a bacterial mixture can comprise a consortium of fecal bacteria (e.g., for delivering one or more bile acid transforming bacteria to an intestine of a subject administered the composition). In various aspects, a consortium of fecal bacteria incorporated into a pharmaceutical composition can be cultured or uncultured. In an aspect, a consortium of fecal bacteria harvested from a stool of a donor can be selected for inclusion in a composition on the basis of a level or quantity of a secondary bile acid in a stool of a donor of the fecal bacteria above a threshold value. In another aspect, a consortium of fecal bacteria can be selected for inclusion in a pharmaceutical composition described herein on the basis of the production above a threshold value of a level of a secondary bile acid by the fecal bacteria in an ex vivo assay. In another aspect, a consortium of fecal bacteria can be selected for inclusion in a pharmaceutical composition described herein on the basis of the relative abundance of one or more bile acid-producing bacteria in the consortium, as determined by the presence or abundance of bile acid metabolism consensus sequences. In an aspect, a donor of stool used as starting material to prepare a bacterial mixture is administered a prebiotic prior to donating the stool. In another aspect, a donor of stool used as starting material to prepare bacterial mixture is not administered a prebiotic prior to the donation.

[0126] In one aspect, a consortium of fecal bacteria is in the form of an entire or substantially complete fecal microbiota from stool of a donor. In one aspect, a consortium of fecal bacteria comprises an isolated or purified population of live non-pathogenic fecal bacteria. In a further aspect, a consortium of fecal bacteria is in the form of a substantially complete fecal microbiota preparation from a single donor. In another aspect, a pharmaceutical composition described herein comprises a bacterial mixture comprising one or more live, non-pathogenic, bacterial isolates and a consortium of fecal bacteria, for example in the form of uncultured fecal bacteria or a preparation of fermented or co-cultured fecal bacteria.

[0127] In an aspect, the processing of a consortium of fecal bacteria involves a treatment selected from the group consisting of ethanol treatment, detergent treatment, heat treatment, irradiation, and sonication. In another aspect, the consortium of fecal bacteria is not processed with an ethanol treatment, detergent treatment, heat treatment, irradiation, or sonication. In one aspect, the a consortium of fecal bacteria is subjected to a separation step selected from the group consisting of density gradients, filtration (e.g., sieves, nylon mesh), and chromatography. In another aspect, the a consortium of fecal bacteria is not subjected to a separation step selected from the group consisting of density gradients, filtration (e.g., sieves, nylon mesh), and chromatography. In another aspect, a pharmaceutical composition administered herein comprises a consortium of fecal bacteria substantially free of donor eukaryotic cells.

[0128] In an aspect, a pharmaceutical composition provided or administered herein comprises a consortium of fecal bacteria comprising a Shannon Diversity Index of greater than or equal to 0.3, greater than or equal to 0.4, greater than or equal to 0.5, greater than or equal to 0.6, greater than or equal to 0.7, greater than or equal to 0.8, greater than or equal to 0.9, greater than or equal to 1.0, greater than or equal to 1.1, greater than or equal to 1.2, greater than or equal to 1.3, greater than or equal to 1.4, greater than or equal to 1.5, greater than or equal to 1.6, greater than or equal to 1.7, greater than or equal to 1.8, greater than or equal to 1.9, greater than or equal to 2.0, greater than or equal to 2.1, greater than or equal to 2.2, greater than or equal to 2.3, greater than or equal to 2.4, greater than or equal to 2.5, greater than or equal to 3.0, greater than or equal to 3.1, greater than or equal to 3.2, greater than or equal to 3.3, greater than or equal to 3.4, greater than or equal to 3.5, greater than or equal to 3.6, greater than or equal to 3.7, greater than or equal to 3.8, greater than or equal to 3.9, greater than or equal to 4.0, greater than or equal to 4.1, greater than or equal to 4.2, greater than or equal to 4.3, greater than or equal to 4.4, greater than or equal to 4.5, or greater than or equal to 5.0. In another aspect, a pharmaceutical composition comprises fecal microbiota comprising a Shannon Diversity Index of between 0.1 and 3.0, between 0.1 and 2.5, between 0.1 and 2.4, between 0.1 and 2.3, between 0.1 and 2.2, between 0.1 and 2.1, between 0.1 and 2.0, between 0.4 and 2.5, between 0.4 and 3.0, between 0.5 and 5.0, between 0.7 and 5.0, between 0.9 and 5.0, between 1.1 and 5.0, between 1.3 and 5.0, between 1.5 and 5.0, between 1.7 and 5.0, between 1.9 and 5.0, between 2.1 and 5.0, between 2.3 and 5.0, between 2.5 and 5.0, between 2.7 and 5.0, between 2.9 and 5.0, between 3.1 and 5.0, between 3.3 and 5.0, between 3.5 and 5.0, between 3.7 and 5.0, between 31.9 and 5.0, or between 4.1 and 5.0. In one aspect, a Shannon Diversity Index is calculated at the phylum level. In another aspect, a Shannon Diversity Index is calculated at the family level. In one aspect, a Shannon Diversity Index is calculated at the genus level. In another aspect, a Shannon Diversity Index is calculated at the species level. In a further aspect, a pharmaceutical composition comprises a preparation of flora in proportional content that resembles a normal healthy human fecal flora.

[0129] In a further aspect, a pharmaceutical composition comprises fecal bacteria (e.g., a consortium of fecal bacteria selected to produce one or more secondary bile acids at or above a threshold level) from at least 1, 2, 3, 4, 5, 6, 7, 8, 9, or 10 different families. In another aspect, a pharmaceutical composition comprises fecal bacteria from at least 11, 12, 13, 14, 15, 16, 17, 18, 19, or 20 different families. In yet another aspect, a pharmaceutical composition comprises fecal bacteria from at least 21, 22, 23, 24, 25, 26, 27, 28, 29, or 30 different families. In a further aspect, a pharmaceutical composition comprises fecal bacteria from at least 31, 32, 33, 34, 35, 36, 37, 38, 39, or 40 different families. In another aspect, a pharmaceutical composition comprises fecal bacteria from at least 41, 42, 43, 44, 45, 46, 47, 48, 49, or 50 different families. In another aspect, a pharmaceutical composition comprises fecal bacteria from between 1 and 10, between 10 and 20, between 20 and 30, between 30 and 40, between 40 and 50 different families. In an aspect, a pharmaceutical composition provided or administered herein comprises a consortium of fecal bacteria comprising no greater than 0.05%, 0.1%, 0.2%, 0.3%, 0.4%, 0.5%, 0.6%, 0.7%, 0.8%, 0.9%, 1%, 2%, 3%, 4%, 5%, 6%, 7%, 8%, 9%, or 10% weight non-living material/weight biological material. In another aspect, a pharmaceutical composition provided or administered herein comprises a preparation of fecal bacteria comprising no greater than 20%, 25%, 30%, 35%, 40%, 45%, 50%, 55%, 60%, 65%, 70%, 75%, 80%, 85%, 90%, or 95% weight non-living material/weight biological material. In another aspect, a pharmaceutical composition provided or administered herein comprises, consists of, or consists essentially of, particles of non-living stool material and/or particles of biological material of a fecal sample that passes through a sieve, a column, or a similar filtering device having a sieve, exclusion, or particle filter size of 2.0 mm, 1.0 mm, 0.5 mm, 0.33 mm, 0.25 mm, 0.212 mm, 0.180 mm, 0.150 mm, 0.125 mm, 0.106 mm, 0.090 mm, 0.075 mm, 0.063 mm, 0.053 mm, 0.045 mm, 0.038 mm, 0.032 mm, 0.025 mm, 0.020 mm, 0.01 mm, or 0.002 mm. “Non-living stool material” refers to material present in stool when the stool is collected from a donor, and does not include an excipient, e.g., a pharmaceutically inactive substance, such as a cryoprotectant, added during processing of fecal material. “Biological material” refers to the living material in fecal material, and includes microbes including prokaryotic cells, such as bacteria and archaea (e.g., living prokaryotic cells and spores that can sporulate to become living prokaryotic cells), eukaryotic cells such as protozoa and fungi, and viruses. In one aspect, “biological material” refers to the living material, e.g., the microbes, eukaryotic cells, and viruses, which are present in the intestine (e.g., colon) of a normal healthy human. In an aspect, a pharmaceutical composition provided or administered herein comprises an extract of human stool, wherein the composition is substantially odorless. In an aspect, a pharmaceutical composition provided or administered herein comprises fecal material or a fecal floral preparation in a lyophilized, crude, semi-purified or purified formulation.

[0130] In an aspect, a consortium of fecal bacteria included in a pharmaceutical composition comprises highly refined or purified fecal flora, e.g., substantially free of non-floral fecal material. In an aspect, a fecal microbiota (comprising a consortium of fecal bacteria) harvested from a donor can be further processed, e.g., to undergo microfiltration before, after, or before and after sieving. In another aspect, a highly purified fecal microbiota product is ultra-filtrated to remove large molecules but retain the therapeutic microflora, e.g., bacteria.

[0131] In another aspect, a pharmaceutical composition described herein comprises a purified fecal flora or entire (or substantially entire) microbiota that is (or comprises) an isolate of fecal flora that is at least about 90%, 91%, 92%, 93%, 94%, 95%, 96%, 97%, 98%, 99%, 99.5%, 99.6%, 99.7%, 99.8% or 99.9% isolated or pure, or having no more than about 0.1%, 0.2%, 0.3%, 0.4%, 0.5%, 0.6%, 0.7%, 0.8%, 0.9% or 1.0% or more non-fecal floral material; or, a substantially isolated, purified, or substantially entire microbiota as described in Sadowsky et al., WO 2012/122478 A1, or as described in Borody et al., WO 2012/016287 A2.

[0132] In an aspect, a pharmaceutical composition comprises the substantially entire fecal microbiota of stool of a donor. In another aspect, a pharmaceutical composition comprises no antibiotic resistant bacteria. In another aspect, a pharmaceutical composition comprises a preparation of uncultured fecal bacteria that is largely free of extraneous matter (e.g., non-living matter including acellular matter such as residual fiber, DNA, RNA, viral coat material, non-viable material; and living matter such as eukaryotic cells from the donor of the fecal matter).

[0133] In an aspect, a consortium of fecal bacteria included in a pharmaceutical composition are derived from a disease-screened stool sample of a human donor. In an aspect, a stool does not include an antibiotic resistant population of bacteria. For example, a composition can comprise a consortium of fecal bacteria or a preparation of viable flora which in proportional content resembles normal healthy human fecal flora which does not include antibiotic resistant populations.

[0134] In one aspect, a consortium of fecal bacteria described and used herein comprises one or more, two or more, three or more, four or more, or five or more live fecal bacteria selected from the group consisting of Clostridium hiranonis, Clostridium hylemonae, Clostridium scindens, Ruminococcus gnavus, Coprococcus comes, Faecalibacterium prausnitzii, Eubacterium ventriosum, Bacteroides pectinophilus, Dorea formicigenerans, Acidaminococcus, Akkermansia, Alistipes, Anaerotruncus, Bacteroides, Bifidobacterium, Blautia, Butyrivibrio, Clostridium, Collinsella, Coprococcus, Corynebacterium, Dorea, Enterococcus, Escherichia, Eubacterium, Faecalibacterium, Haemophilus, Holdemania, Lactobacillus, Moraxella, Parabacteroides, Prevotella, Propionibacterium, Raoultella, Roseburia, Ruminococcus, Staphylococcus, Streptococcus, Subdoligranulum, and Veillonella. In one aspect, a consortium of fecal bacteria comprises one or more, two or more, three or more, four or more, or five or more live fecal microorganisms selected from the group consisting of Bacteroides fragilis ssp. vulgatus, Collinsella aerofaciens, Bacteroides fragilis ssp. thetaiotaomicron, Peptostreptococcus productus II, Parabacteroides distasonis, Faecalibacterium prausnitzii, Coprococcus eutactus, Peptostreptococcus productus I, Ruminococcus bromii, Bifidobacterium adolescentis, Gemmiger formicilis, Bifidobacterium longum, Eubacterium siraeum, Ruminococcus torques, Eubacterium rectale, Eubacterium eligens, Bacteroides eggerthii, Clostridium leptum, Bacteroides fragilis ssp. A, Eubacterium biforme, Bifidobacterium infantis, Eubacterium rectale, Coprococcus comes, Pseudoflavonifractor capillosus, Ruminococcus albus, Dorea formicigenerans, Eubacterium hallii, Eubacterium ventriosum I, Fusobacterium russi, Ruminococcus obeum, Eubacterium rectale, Clostridium ramosum, Lactobacillus leichmannii, Ruminococcus callidus, Butyrivibrio crossotus, Acidaminococcus fermentans, Eubacterium ventriosum, Bacteroides fragilis ssp. fragilis, Coprococcus catus, Aerostipes hadrus, Eubacterium cylindroides, Eubacterium ruminantium, Staphylococcus epidermidis, Eubacterium limosum, Tissirella praeacuta, Fusobacterium mortiferum I, Fusohacterium naviforme, Clostridium innocuum, Clostridium ramosum, Propionibacterium acnes, Ruminococcus flavefaciens, Bacteroides fragilis ssp. ovatus, Fusobacterium nucleatum, Fusobacterium mortiferum, Escherichia coli, Gemella morbillorum, Finegoldia magnus, Streptococcus intermedius, Ruminococcus lactaris, Eubacterium tetme, Eubacterium ramulus, Bacteroides clostridiiformis ssp. clostridliformis, Bacteroides coagulans, Prevotella oralis, Prevotella ruminicola, Odoribacter splanchnicus, and Desuifomonas pigra. In one aspect, a consortium of fecal bacteria comprises one or more, two or more, three or more, four or more, or five or more live fecal microorganisms selected from the group consisting of Bacteroides, Parabacteroides, Butyricimonas, Odoribacter, Porphyromonas, Alistipes, and a combination thereof. In one aspect, a consortium of fecal bacteria comprises one or more, two or more, three or more, four or more, or five or more live fecal microorganisms selected from the group consisting of Bacteroides uniformis, Bacteroides finegoldii, Bacteroides fragilis, Bacteroides dorei, Bacteroides vulgatus, Bacteroides caccae, Bacteroides ovatus, Bacteroides eggerthii, Bacteroides thetaiotaomicron, Parabacteroides goldsteinii, Parabacteroides distasonis, Parabacteroides merdae, Butyricimonas synergistica, Odoribacter laneus, Porphyromonas somerae, Alistipes indistinctus, Alistipes onderdonkii, Alistipes finegoldii, and a combination thereof.

[0135] In one aspect, a consortium of fecal bacteria described herein comprises one or more primary bile acid transforming bacterial strain or species. In aspects, a consortium of fecal bacteria includes at least 1, at least 2, at least 3, at least 4, at least 5, at least 6, at least 7, at least 8, at least 9, at least 10, at least 11, at least 12, at least 13, at least 14, at least 15, at least 20, at least 25, at least 30, at least 35, at least 40, at least 45, at least 50, or greater than 50 primary bile acid transforming bacterial strain or species.

[0136] In one aspect, a consortium of fecal bacteria described herein comprises one or more secondary bile acid converting bacteria. In aspects, a consortium of fecal bacteria includes at least 1, at least 2, at least 3, at least 4, at least 5, at least 6, at least 7, at least 8, at least 9, at least 10, at least 11, at least 12, at least 13, at least 14, at least 15, at least 20, at least 25, at least 30, at least 35, at least 40, at least 45, at least 50, or greater than 50 secondary bile acid converting bacterial species.

[0137] In an aspect, a pharmaceutical composition can comprise a consortium of fecal bacteria selected on the basis of the presence of one or more bile acid transforming bacteria in the consortium (or in stool from which the consortium is derived), or on the basis of a relative abundance of one or more bile acid transforming bacteria in the consortium (or in stool from which the consortium is derived) at or above a threshold relative abundance. In various aspects, a pharmaceutical composition comprises a consortium of fecal bacteria comprising one or more bile acid transforming bacterial strain or species at a relative abundance in the preparation of at least 0.5, at least 1, at least 2, at least 3, at least 4, at least 5, at least 6, at least 7, at least 8, at least 9, at least 10, at least 11, at least 12, at least 13, at least 14, at least 15, at least 16, at least 17, at least 18, at least 19, at least 20, at least 21, at least 22, at least 23, at least 24, at least 25, at least 26, at least 27, at least 28, at least 29, at least 30, at least 35, at least 40, at least 45, at least 50, at least 55, at least 60, at least 65, at least 70, at least 75, at least 80, or greater than 80%.

[0138] In one aspect, a consortium of fecal bacteria described and used herein lacks or is substantially devoid of one or more, two or more, three or more, four or more, or five or more live fecal microorganisms selected from the group consisting of Acidaminococcus, Akkermansia, Alistipes, Anaerotruncus, Bacteroides, Bifidobacterium, Blautia, Butyrivibrio, Clostridium, Collinsella, Coprococcus, Corynebacterium, Dorea, Farterococcus, Escherichia, Eubacterium, Faecalibacterium, Haemophilus, Holdemania, Lactobacillus, Moraxella, Parabacteroides, Prevotella, Propionibacterium, Raoultella, Roseburia, Ruminococcus, Staphylococcus, Streptococcus, Subdoligranulum, and Veillonella. In one aspect, a consortium of fecal bacteria lacks or is substantially devoid of one or more, two or more, three or more, four or more, or five or live more fecal microorganisms selected from the group consisting of Bacteroides fragilis ssp. vulgatus, Collinsella aerofaciens, Bacteroides fragilis ssp. thetaiotaomicron, Peptostreptococcus productus II, Parabacteroides distasonis, Faecalibacterium prausnitzii, Coprococcus eutactus, Peptostreptococcus productus I, Ruminococcus bromii, Bifidobacterium adolescentis, Gemmiger formicilis, Bifidobacterium longum, Eubacterium siraeum, Ruminococcus torques, Eubacterium rectale, Eubacterium eligens, Bacteroides eggerthii, Clostridium leptum, Bacteroides fragilis ssp. A, Eubacterium biforme, Bifidobacterium infantis, Eubacterium rectale, Coprococcus comes, Pseudoflavonifractor capillosus, Ruminococcus albus, Dorea formicigenerans, Eubacterium hallii, Eubacterium ventriosum I, Fusobacterium russi, Ruminococcus obeum, Eubacterium rectale, Clostridium ramosum, Lactobacillus leichmannii, Ruminococcus callidus, Butyrivibrio crossotus, Acidaminococcus fermentans, Eubacterium ventriosum, Bacteroides fragilis ssp. fragilis, Coprococcus catus, Aerostipes hadrus, Eubacterium cylindroides, Eubacterium ruminantium, Staphylococcus epidermidis, Eubacterium limosum, Tissirella praeacuta, Fusobacterium mortiferum I, Fusobacterium naviforme, Clostridium innocuum, Clostridium ramosum, Propionibacterium acnes, Ruminococcus flavefaciens, Bacteroides fragilis ssp. ovatus, Fusobacterium nucleatum, Fusobacterium mortiferum, Escherichia coli, Gemella morbillorum, Finegoldia magnus, Streptococcus intermedius, Ruminococcus lactaris, Eubacterium tenue, Eubacterium ramulus, Bacteroides clostridiiformis ssp. clostridliformis, Bacteroides coagulans, Prevotella oralis, Prevotella ruminicola, Odoribacter splanchnicus, and Desuifomonas pigra.

[0139] In an aspect, a consortium of fecal bacteria for incorporation into a pharmaceutical composition comprise non-pathogenic spores of one or more, two or more, three or more, or four or more Clostridium species selected from the group consisting of Clostridium absonum, Clostridium argentinense, Clostridium baratii, Clostridium botulinum, Clostridium cadaveris, Clostridium carnis, Clostridium celatum, Clostridium chauvoei, Clostridium clostridioforme, Clostridium cochlearium, Clostridium fallax, Clostridium felsineum, Clostridium ghonii, Clostridium glycolicum, Clostridium haemolyticum, Clostridium hastiforme, Clostridium histolyticuum, Clostridium indolis, Clostridium irregulare, Clostridium limosum, Clostridium malenominatum, Clostridium novyi, Clostridium oroticum, Clostridium paraputrificum, Clostridium perfringens, Clostridium piiforme, Clostridium putrefaciens, Clostridium putrificum, Clostridium sardiniense, Clostridium sartagoforme, Clostridium scindens, Clostridium septicum, Clostridium sordellii, Clostridium sphenoides, Clostridium spiroforme, Clostridium sporogenes, Clostridium subterminale, Clostridium symbiosum, Clostridium tertium, Clostridium tetani, Clostridium welchii, and Clostridium villosum. In an aspect, a pharmaceutical composition comprises one or more, two or more, three or more, or four or more non-pathogenic Bacteroides species selected from the group of Bacteroides coprocola, Bacteroides plebeius, Bacteroides massiliensis, Bacteroides vulgatus, Bacteroides helcogenes, Bacteroides pyogenes, Bacteroides tectus, Bacteroides uniformis, Bacteroides stercoris, Bacteroides eggerthii, Bacteroides finegoldii, Bacteroides thetaiotaomicron, Bacteroides ovatus, Bacteroides acidifaciens, Bacteroides caccae, Bacteroides nordii, Bacteroides salyersiae, Bacteroides fragilis, Bacteroides intestinalis, Bacteroides coprosuis, Bacteroides distasonis, Bacteroides goldsteinii, Bacteroides merdae, Bacteroides forsythus, Bacteroides splanchnicus, Bacteroides capillosus, Bacteroides cellulosolvens, and Bacteroides ureolyticus.

[0140] In an aspect, a consortium of fecal bacteria for incorporation into a pharmaceutical composition comprise non-pathogenic spores of one or more, two or more, three or more, or four or more bacterial species from a genus selected from the group consisting of Bacteroides, Parabacteroides, Butyricimonas, Odoribacter, Porphyromonas, Alistipes, and a combination thereof. In an aspect, a consortium of fecal bacteria for incorporation into a pharmaceutical composition comprise non-pathogenic spores of one or more, two or more, three or more, or four or more bacterial species selected from the group consisting of Bacteroides uniformis, Bacteroides finegoldii, Bacteroides fragilis, Bacteroides dorei, Bacteroides vulgatus, Bacteroides caccae, Bacteroides ovatus, Bacteroides eggerthii, Bacteroides thetaiotaomicron, Parabacteroides goldsteinii, Parabacteroides distasonis, Parabacteroides merdae, Butvricimonas synergistica, Odoribacter laneus, Porphyromonas somerae, Alistipes indistinctus, Alistipes onderdonkii, Alistipes finegoldii, and a combination thereof.

[0141] In an aspect, a consortium of fecal bacteria extracted from a stool of a donor comprises all (100%) of the bacterial strain or species originally present in the stool of the donor. In an aspect, a consortium of fecal bacteria extracted from a stool of a donor comprises 99.9% of the bacterial strain or species originally present in the stool of the donor. In an aspect, a consortium of fecal bacteria extracted from stool of a donor comprises 99.8, 99.7, 99.6, 99.5, 99.4, 99.3, 99.2, 99.1, 99, 98, 97, 96, 95, 94, 93, 92, 91, 90, 89, 88, 87, 85, 84, 83, 82, 81, 80, 75, 70, 65, 60, 55, 50, 45, or 40% of the bacterial strain or species originally present in the stool of the donor.

[0142] In an aspect, a pharmaceutical composition disclosed herein comprises a sterile fecal filtrate or a non-cellular fecal filtrate. In one aspect, a sterile fecal filtrate originates from a donor stool. In another aspect, a sterile fecal filtrate originates from cultured microorganisms. In another aspect, a sterile fecal filtrate comprises a non-cellular non-particulate fecal component. In one aspect, a sterile fecal filtrate is made as described in WO2014/078911, published May 30, 2014. In another aspect, a sterile fecal filtrate is made as described in Ott et al., Gastroenterology 152:799-911(2017).

[0143] In one aspect, a fecal filtrate comprises secreted, excreted or otherwise liquid components or a microbiota, e.g., biologically active molecules (BAMs), which can be antibiotics or anti-inflammatories, are preserved, retained or reconstituted in a flora extract.

[0144] In one aspect, preparation of a fecal filtrate comprises receiving stool from a donor, homogenizing and centrifuging the stool, and then filtering with very high-level filtration using e.g., either metal sieving or Millipore filters, or equivalent, to ultimately permit only cells of bacterial origin to remain, e.g., often less than about 5 micrometers diameter. After the initial centrifugation, the solid material can be separated from the liquid, and the solid ban then be filtered in progressively reducing size filters and tangential filters, e.g., using a Millipore filtration, and optionally, also comprising use of nano-membrane filtering. The filtering can also be done by sieves as described in WO 2012/122478, but in contrast using sieves that are smaller than 0.0120 mm, down to about 0.0110 mm, which ultimately result in having only bacterial cells present.

[0145] The supernatant separated during centrifugation can in some aspects be filtered progressively in a filtering, e.g., a Millipore filtering or equivalent systems, to produce a liquid which is finely filtered through an about 0.22 micron filter. This removes all particulate matter including all living matter, including bacteria and viruses. The product then is sterile, but the aim is to remove the bacteria but to keep their secretions, especially antimicrobial bacteriocins, bacteria-derived cytokine-like products and all accompanying Biologically Active Molecules (BAMs), including: thuricin (which is secreted by bacilli in donor stools), bacteriocins (including colicin, troudulixine or putaindicine, or microcin or subtilosin A), lanbiotics (including nisin, subtilin, epidermin, mutacin, mersacidin, actagardine, cinnamycin), lacticins and other antimicrobial or anti-inflammatory compounds.

[0146] In one aspect, a pharmaceutical composition comprises reconstituted fecal flora consisting essentially of a combination of a purified fecal microbiota (e.g., a consortium of fecal bacteria) and a non-cellular fecal filtrate. In another aspect, a pharmaceutical composition comprises a purified fecal microbiota (e.g., a consortium of fecal bacteria) supplemented with one or more non-cellular non-particulate fecal components. In one aspect, a pharmaceutical composition comprises one or more non-cellular non-particulate fecal components. In one aspect, one or more non-cellular non-particulate fecal components comprise synthetic molecules, biologically active molecules produced by a fecal microorganism, or both. In another aspect, one or more non-cellular non-particulate fecal components comprise biologically active proteins or peptides, micronutrients, fats, sugars, small carbohydrates, trace elements, mineral salts, ash, mucous, amino acids, nutrients, vitamins, minerals, or any combination thereof. In one aspect, one or more non-cellular non-particulate fecal components comprise one or more biologically active molecules selected from the group consisting of bacteriocin, lanbiotic, and lacticin. In another aspect, one or more non-cellular non-particulate fecal components comprise one or more bacteriocins selected from the group consisting of colicin, troudulixine, putaindicine, microcin, and subtilosin A. In one aspect, one or more non-cellular non-particulate fecal components comprise one or more lanbiotics selected from the group consisting of thuricin, nisin, subtilin, epidermin, mutacin, mersacidin, actagardine, and cinnamycin. In another aspect, one or more non-cellular non-particulate fecal components comprise an anti-spore compound, an antimicrobial compound, an anti-inflammatory compound, or any combination thereof. In a further aspect, one or more non-cellular non-particulate fecal components comprise an interleukin, a cytokine, a leukotriene, an eicosanoid, or any combination thereof.

[0147] In another aspect, a pharmaceutical composition comprises both a consortium of fecal bacteria, e.g., a partial or a complete representation of the human gastrointestinal (GI) microbiota, and an isolated, processed, filtered, concentrated, reconstituted and/or artificial liquid component (e.g., fecal filtrate) of the flora (the microbiota) which comprises, among others ingredients, bacterial secretory products such as e.g., bacteriocins (proteinaceous toxins produced by bacteria, including colicin, troudulixine or putaindicine, or microcin or subtilosin A), lanbiotics (a class of peptide antibiotics that contain a characteristic polycyclic thioether amino acid lanthionine or methyllanthionine, and unsaturated amino acids dehydroalanine and 2-aminoisobutyric acid; which include thuricin (which is secreted by bacilli in donor stools), nisin, subtilin, epidermin, mutacin, mersacidin, actagardine, cinnamycin), a lacticin (a family of pore-forming peptidic toxins) and other antimicrobial or anti-inflammatory compounds and/or additional biologically active molecules (BAMs) produced by bacteria or other microorganisms of the microbiota, and/or which are found in the “liquid component” of a microbiota.

[0148] In one aspect, a pharmaceutical composition comprising a consortium of fecal bacteria (e.g., selected to comprise one or more bile acid transforming bacteria) is used concurrently with a fecal non-cellular filtrate-based pharmaceutical composition. In another aspect, a patient is treated with a first fecal non-cellular filtrate-based pharmaceutical composition before being given a second pharmaceutical composition comprising a consortium of fecal bacteria (e.g., selected to produce one or more secondary bile acids), or vice versa. In a further aspect, a treatment method comprises three steps: first, antibiotic pretreatment to non-selectively remove infectious pathogen(s); second, a fecal non-cellular filtrate-based treatment step to further suppress selected infectious pathogen(s); and third, treatment with a pharmaceutical composition comprising a consortium of fecal bacteria to re-establish a functional intestinal microbiome.

[0149] In an aspect, a composition comprising a consortium of fecal bacteria and/or one or more bacterial isolates administered to a subject having or at risk for a disorder (e.g., a disorder that can be treated by delivery of one or more bile acid transforming bacteria to the intestine of the subject) effects a cure, reduction of the symptoms, or a percentage reduction of symptoms of the disorder based on replacement of bacterial cells endogenous to the intestinal flora of the subject with bacterial cells from the administered bacterial mixture. The change of flora can be as “near-complete” as possible. Typically, the change in enteric flora comprises introduction of an array of flora derived from the stool of a healthy human donor and/or one or more bacterial isolates into the gastro-intestinal system of the subject, which can substantially or completely displace pathogenic enteric flora in a patient requiring such treatment (e.g., an IBD or hepatic encephalopathy patient). In an aspect, engraftment of the administered bacteria in the intestine of the patient results in an enhancement or facilitation of bile acid metabolism by the engrafted bacteria, which as described herein can produce therapeutic effects in the patient.

[0150] The pharmaceutical compositions described herein can comprise microbes, e.g., bacteria, derived from a stool of a donor, e.g., a healthy human donor. In an aspect, a composition incorporates a consortium of fecal bacteria derived from all or a portion of a fecal microbiota of a stool of a healthy human donor. For example, a composition can incorporate a substantially complete fecal microbiota of a stool of a healthy human donor. In an aspect, a composition incorporates a bacterial isolate of a fecal microbiota, wherein the bacterial isolate has been purified and/or cultured from the fecal microbiota of a stool from a healthy human donor. The harvesting, extraction and/or purification of a fecal microbiota from a stool can thus be performed to prepare a composition comprising at least one of a consortium of fecal bacteria or a bacterial isolate.

[0151] In one aspect, an exemplary fecal microbiota for use in preparing a composition described herein (e.g., comprising a consortium of fecal bacteria or a bacterial isolate) comprises starting material from a human donor. In another aspect, an exemplary fecal microbiota comprises material from one or more healthy human donors. In yet another aspect, an exemplary fecal microbiota comprises starting material from a pool of known, defined donors. In another aspect, a donor is an adult male. In a further aspect, a donor is an adult female. In yet another aspect, a donor is an adolescent male. In another aspect, a donor is an adolescent female. In another aspect, a donor is a female toddler. In another aspect, a donor is a male toddler. In another aspect, a donor is healthy. In one aspect, a human donor is a child below about 18, 15, 12, 10, 8, 6, 4, 3, 2, or 1-year-old. In another aspect, a human donor is an elderly individual. In a further aspect, a human donor is an individual above about 30, 35, 40, 45, 50, 55, 60, 65, 70, 75, 80, 85, 90, or 95 years old. In another aspect, a donor is between 1 and 5, between 2 and 10, between 3 and 18, between 21 and 50, between 21 and 40, between 21 and 30, between 50 and 90, between 60 and 90, between 70 and 90, between 60 and 80, or between 65 and 75 years old. In one aspect, a donor is a young old individual (65-74 years). In one aspect, a donor is a middle old individual (75-84 years). In one aspect, a donor is an old individual (>85 years). In yet another aspect, a donor is a carefully screened, healthy, neurotypical human.

[0152] In an aspect, a fecal donor can be prescreened for its fecal microbiome profile. In another aspect, a stool donor can be selected on the basis of the presence or absence of one or more bacterial taxa (e.g., phylum, class, order, family, genus, species, or strain) in the donor's stool, for example that are known to comprise bile acid transforming bacteria. In another aspect, a stool donor can be selected on the basis of the presence or absence of one or more bacterial species. In another aspect, a stool donor can be selected on the basis of the presence of one or more bacterial taxa (e.g., phylum, class, order, family, genus, species, or strain) in the donor's stool at a level above a threshold relative abundance. In another aspect, a stool donor can be selected on the basis of the presence or absence of one or more bacterial species in the donor's stool at a level above a threshold relative abundance. In an aspect, a stool donor can be selected on the basis of the presence or increased relative abundance (compared to the stool of one or more other eligible donors) of one or more bile acid transforming bacteria in the stool of the donor. In another aspect, a stool donor can be selected on the basis of the presence or relative abundance of one or more bacterial taxa (e.g., phylum, class, order, family, genus, species, or strain) of bile acid transforming bacteria.

[0153] In an aspect, a relative abundance of one or more bacterial species in stool of a donor can be increased by ingestion by the donor of a prebiotic and/or probiotic that promotes the proliferation or presence of bile acid transforming bacteria, compared to a relative abundance of the bacterial species in the absence of ingesting the probiotic and/or prebiotic. In an aspect, a fecal donor can ingest a stimulant that promotes proliferation of one or more bile acid transforming bacteria prior to donation of a stool for use in preparing a consortium of fecal bacteria for incorporation into a pharmaceutical composition. Examples of stimulants for bile acid transforming bacteria include probiotics and prebiotics. In an aspect, a fecal donor can ingest a probiotic (e.g., comprising one or more bacterial isolates) that comprises one or more bile acid transforming bacteria prior to donation of a stool for use in preparing a consortium of fecal bacteria for incorporation into a pharmaceutical composition. For example, a probiotic administered to a donor can comprise one or more bacterial species of a genus selected from the group consisting of Clostridium, Bacillus, Bacteroides, Bifidobacterium, Catenibacterium, Collinsella, Eggerthella, Lachnospira, Lactobacillus, Parabacteroides, Peptoniphilus, Mediterraneibacter, Clostridium hiranonis, Clostridium hylemonae, Clostridium scindens, Ruminococcus gnavus, Coprococcus comes, Faecalibacterium prausnitzii, Eubacterium ventriosum, Bacteroides pectinophilus, Dorea formicigenerans, Eggerthela lenta, Parabacteroides merdae, Bacteroides dorei, Bacteroides vulgatus, and a combination thereof. In an aspect, a probiotic administered to a donor can comprise one or more bacterial species of a genus selected from the group consisting of Bacteroides, Parabacteroides, Butyricimonas, Odoribacter, Porphyromonas, Alistipes, and a combination thereof. In an aspect, a probiotic administered to a donor can comprise one or more bacterial species selected from the group consisting of Bacteroides uniformis, Bacteroides finegoldii, Bacteroides fragilis, Bacteroides dorei, Bacteroides vulgatus, Bacteroides caccae, Bacteroides ovatus, Bacteroides eggerthii, Bacteroides thetaiotaomicron, Parabacteroides goldsteinii, Parabacteroides distasonis, Parabacteroides merdae, Butyricimonas synergistica, Odoribacter laneus, Porphyromonas somerae, Alistipes indistinctus, Alistipes onderdonkii, Alistipes finegoldii, and a combination thereof. In another aspect, a donor can ingest a prebiotic prior to donation of a stool for use in preparing a consortium of fecal bacteria for incorporation into a pharmaceutical composition. In an aspect, administration of a prebiotic to a donor increases a relative abundance of one or more bile acid transforming bacteria in the stool of the donor. In an aspect, a prebiotic administered to a donor prior to collection of stool from the donor comprises, for example, an amino acid (e.g., valine, leucine, isoleucine), lactic acid, ammonium nitrate, amylose, barley mulch, biotin, carbonate, cellulose, chitin, choline, fructooligosaccharides (FOSs), fructose, glucose, glycerol, heteropolysaccharide, histidine, homopolysaccharide, hydroxyapatite, inulin, isomaltulose, lactose, lactulose, maltodextrins, maltose, nitrogen, oligodextrose, oligofructose, oligofructose-enriched inulin, an oligosaccharide (e.g. comprising a galactooligosaccharide (GOS), trans-galactooligosaccharide, fructooligosaccharide (FOS), xylooligosaccharides (XOS), mannooligosaccharide, or chitooligosaccharide), pectin, phosphate salts, phosphorus, polydextroses, polyols, potash, potassium, sodium nitrate, starch, sucrose, sulfur, sun fiber, tagatose, thiamine, trehalose, vitamins, a water-soluble carbohydrate, a fermentable polysaccharide, a dietary fiber, resistant starch, barley, white navy bean powder, or a combination thereof.

[0154] In an aspect, a carefully screened donor undergoes a complete medical history and physical exam. Donors are excluded if they have a risk of infectious agents. Additional exclusion criteria can comprise the following:
[0155] Known viral infection with Hepatitis B, C or HIV.
[0156] Known exposure to HIV or viral hepatitis at any time
[0157] High risk behaviors including sex for drugs or money, men who have sex with men, more than one sexual partner in the preceding 12 months, any past use of intravenous drugs or intranasal cocaine, history of incarceration.
[0158] Tattoo or body piercing within 12 months.
[0159] Travel to areas of the world where risk of traveler's diarrhea is higher than the US.
[0160] Current communicable disease, e.g., upper respiratory viral infection.
[0161] History of irritable bowel syndrome. Specific symptoms can include frequent abdominal cramps, excessive gas, bloating, abdominal distension, fecal urgency, diarrhea, constipation.
[0162] History of inflammatory bowel disease such as Crohn's disease, ulcerative colitis, microscopic colitis.
[0163] Chronic diarrhea.
[0164] Chronic constipation or use of laxatives.
[0165] History of gastrointestinal malignancy or known colon polyposis.
[0166] History of any abdominal surgery, e.g., gastric bypass, intestinal resection, appendectomy, cholecystectomy, etc.
[0167] Use of Probiotics or any other over the counter aids used by the potential donor for purpose of regulating digestion. Yogurt and kefir products are allowed if taken merely as food rather than nutritional supplements.
[0168] Antibiotics for any indication within the preceding 6 months.
[0169] Any prescribed immunosuppressive or anti-neoplastic medications.
[0170] Metabolic Syndrome, established or emerging. Criteria used for definition here are stricter than any established criteria. These include history of increased blood pressure, history of diabetes or glucose intolerance.
[0171] Known systemic autoimmunity, e.g., connective tissue disease, multiple sclerosis.
[0172] Known atopic diseases including asthma or eczema.
[0173] Chronic pain syndromes including fibromyalgia, chronic fatigue syndrome.
[0174] Ongoing (even if intermittent) use of any prescribed medications, including inhalers or topical creams and ointments.
[0175] Neurologic, neurodevelopmental, and neurodegenerative disorders including autism, Parkinson's disease.
[0176] General. Body mass index >26 kg/m2, central obesity defined by waste:hip ratio >0.85 (male) and >0.80 (female).
[0177] Blood pressure >135 mmHg systolic and >85 mmHg diastolic.
[0178] Skin—presence of a rash, tattoos or body piercing placed within a year, or jaundice
[0179] Enlarged lymph nodes.
[0180] Wheezing on auscultation.
[0181] Hepatomegaly or stigmata of liver disease.
[0182] Swollen or tender joints. Muscle weakness.
[0183] Abnormal neurologic examination.
[0184] Stool positive for Clostridium difficile toxin B tested by PCR.
[0185] Stool positive for any coronavirus tested by PCR.
[0186] Stool positive for COVID-19 tested by PCR.
[0187] Positive stool cultures for any of the routine pathogens including Salmonella, Shigella, Yersinia, Campylobacter, E. coli 0157:H7.
[0188] Abnormal ova and parasites examination.
[0189] Positive Giardia, Cryptosporidium, or Helicobacter pylori antigens
[0190] Positive screening for any viral illnesses, including HIV 1 and 2, Viral Hepatitis A IgM, Hepatitis surface antigen and core Ab.
[0191] Abnormal RPR (screen for syphilis).
[0192] Any abnormal liver function tests including alkaline phosphatase, aspartate aminotransaminase, alanine aminotransferase.
[0193] Raised serum triglycerides >150 mg/Dl.
[0194] HDL cholesterol <40 mg/dL (males) and <50 mg/dL (females).
[0195] High sensitivity CRP >2.4 mg/.
[0196] Raised fasting plasma glucose (>100 mg/dL).

[0197] In one aspect, provided herein is a process for collecting and processing a stool to give rise to a processed or purified consortium of fecal bacteria. The process can comprise first collecting a stool or portion thereof from one or more healthy (e.g., screened) donor(s). In one aspect, a fresh stool or portion thereof is transported via a stool collection device, which can provide or comprises a suitably oxygen free (or substantially oxygen free) appropriate container. In one aspect, the container can be made oxygen free by e.g., incorporating into the container a built in or clipped-on oxygen-scavenging mechanism, e.g., oxygen scavenging pellets as described e.g., in U.S. Pat. No. 7,541,091. In another aspect, the container itself is made of an oxygen scavenging material, e.g., oxygen scavenging iron, e.g., as described by O2BLOCK™, or equivalents, which uses a purified and modified layered clay as a performance-enhancing carrier of oxygen-scavenging iron, the active iron is dispersed directly in the polymer. In one aspect, oxygen-scavenging polymers are used to make the container itself or to coat the container, or as pellets to be added; e.g., as described in U.S. Pat. App. Pub. 20110045222, describing polymer blends having one or more unsaturated olefinic homopolymers or copolymers; one or more polyamide homopolymers or copolymers; one or more polyethylene terephthalate homopolymers or copolymers; that exhibit oxygen-scavenging activity. In one aspect, oxygen-scavenging polymers are used to make the container itself or to coat the container, or as pellets to be added; e.g., as described in U.S. Pat. App. Pub. 20110008554, describing compositions comprising a polyester, a copolyester ether and an oxidation catalyst, wherein the copolyester ether comprises a polyether segment comprising poly(tetramethylene-co-alkylene ether). In one aspect, oxygen-scavenging polymers are used to make the container itself or to coat the container, or as pellets to be added; e.g., as described in U.S. Pat. App. Pub. 201000255231, describing a dispersed iron/salt particle in a polymer matrix, and an oxygen scavenging film with oxygen scavenging particulates.

[0198] Alternatively, in addition to or in place of the oxygen-scavenging mechanism, the air in the container can be removed to produce a vacuum or replaced (completely or substantially) with nitrogen and/or other inert non-reactive gas or gases. In one aspect, the container simulates (creates) partially, substantially or completely an anaerobic environment.

[0199] In one aspect, the stool (e.g., fecal sample) is held in an aesthetically acceptable container that will not leak or release an odor yet maintain an anaerobic environment internally. In one aspect, the container is sterile before receiving the stool comprising the fecal flora.

[0200] In one aspect, a stool provided herein is maintained at room temperature during most or all of its transportation to and/or storage at a storage facility, e.g., a “stool bank”. For example, once delivered to a processing stool bank, the stool can be stored at ambient temperature, e.g., room temperature. In one aspect, stabilizing agents, such as a cryoprotectant such as glycerol or trehalose or an antioxidant such as cysteine, are added to the harvested and/or stored fecal material.

[0201] In one aspect, the stool is tested for various pathogens, as noted above. In one aspect, once cleared of infective agents, a stool or portion or sample thereof is homogenized in a liquid (e.g., comprising one or more of a buffer, saline, a cryoprotectant or an antioxidant) and filtered to remove large particles of matter. In one aspect, the stool is subdivided into desired volumes, e.g., which can be between 5 cc and 3 or more liters. For example, in one aspect, a container comprises a 50 gram (g) stool, which can be held in an appropriate oxygen resistant plastic, e.g., a metallized polyethylene terephthalate polyester film, or a metallized MYLAR™.

[0202] In one aspect, the stool is subject to homogenization by for example, mixing, agitating, stirring, shaking or grinding. In certain aspects, a stool sample is diluted with a homogenization buffer prior to homogenization. A homogenization buffer can, for example, contain a cryoprotectant (e.g., trehalose or glycerol), an antioxidant or reducing agent (e.g., cysteine), and saline and/or a buffer (e.g., 0.25×PBS at pH 7.4).

[0203] In one aspect, to separate the non-bacterial components from the fecal microbiota, the stool can be homogenized and filtered from rough particulate matter and/or fiber. In one aspect, the microscopic fiber/nonliving matter is then separated from the bacteria. Several methods can be used, including e.g., recurrent filtration with filter sizes, e.g., progressively coming down to the size of a typical bacterium. In one aspect, different filters are used to isolate bacterial sp., or a technique as used by Williams in WO 2011/033310A1, which uses a crude technique of filtration with a gauze.

[0204] In one aspect, a filtration procedure for filtering whole stool is suitably used to reach the highest concentration of almost 100% bacteria in a filtered composition. In one aspect, the filtering procedure is a two-step procedure suitably using glass fiber depth filters for initial clarification. In one aspect, the stool is filtered under positive pressure. In one aspect, this would be using a combination or sandwich configuration with a 30 micron PVDF filter. In one aspect, this sandwich procedure will be filtering the product under positive pressure. Later, membrane concentration can, in one aspect, be used as another step to reduce the volume of the filtrate. In one aspect, this can be done prior to freeze drying or spray drying under nitrogen cover.

[0205] Alternative membranes that can be used for filtration include, but not limited to, nylon filters, cellulose nitrate filters, polyethersulfone (PES) filters, polytetrafluorethylene (PTFE) filters, TEFLON™ filters, mixed cellulose Ester filters, polycarbonate filters, polypropylene filters, Polyvinylchloride (PVC) filters or quartz filters. Various combinations of these can be used to achieve a high purity of bacteria with solids and liquid removed.

[0206] In another aspect, a pharmaceutical composition comprises a bacterial mixture comprising a consortium of fecal bacteria supplemented, spiked, enriched, or enhanced with one or more bacterial isolates (e.g., a probiotic or a bacterial isolate selected from a consortium of fecal bacteria on the basis that such bacterial isolate corresponds to a bacterial clade associated with alleviation of a deficiency in bile acid metabolism in a patient). For example, a bacterial mixture can comprise a consortium of fecal bacteria spiked with one or more bacterial isolates comprising one or more bile acid transforming bacteria. By enriching or spiking a consortium of fecal bacteria derived from a stool (e.g., in the form of a fecal microbiota) of a healthy donor with one or more non-pathogenic bacterial isolates (e.g. comprising one or more bile acid transforming bacteria), a bacterial mixture can be produced in which the amount of a particular bacterial species (i.e. the spiked-in bacterial isolate(s)) can be accounted for and precisely controlled. Without wishing to be bound by theory, this can be advantageous, for example, where a bacterial isolate mixed with the consortium of fecal bacteria is capable of alleviating or treating a disorder of a subject (e.g., by rescuing a deficiency in bile acid metabolism), but insufficient or less effective when administered on its own (apart from the co-administration of a consortium of fecal bacteria) to generate a complete or maximal or optimal treatment response in the subject. Co-administration to a subject of one or more bacterial isolates together with a consortium of fecal bacteria (i.e., derived from a healthy donor) provides the subject with the advantage of the bile acid transforming activity of the administered bacterial isolate combined with multi-factorial benefits conferred by the “microbiota scaffold” component of the mixture. These co-administered species present in the consortium of fecal bacteria may combine to, for example, provide for the necessary milieux or matrix (e.g., via one or more factors released or secreted by the bacterial species) to enable cells of the bacterial isolate to engraft in the intestine and/or induce an optimal response in the subject, or may directly induce a response in the subject that combines and/or synergizes with a response induced by the bacterial isolate to treat the subject. Accordingly, in certain aspects, a pharmaceutical composition comprising a mixture of one or more bacterial isolates and consortium of fecal bacteria can be more effective in treating a disorder of a subject (e.g., a disorder that can be treated by intestinal delivery of one or more bile acid transforming bacteria) than a composition comprising either the bacterial isolate or the consortium of fecal bacteria alone.

### Pharmaceutical Compositions, Formulations, and Administration

[0207] Described herein are pharmaceutical compositions comprising a bacterial mixture in various formulations. Any pharmaceutical composition (and/or additional therapeutic agents) described herein can take the form of tablets, pills, pellets, capsules, capsules containing liquids, capsules containing multiparticulates, powders, solutions, emulsion, drops, suppositories, emulsions, aerosols, sprays, suspensions, delayed-release formulations, sustained-release formulations, controlled-release formulations, or any other form suitable for use.

[0208] The formulations comprising the pharmaceutical compositions described herein can conveniently be presented in unit dosage forms. For example, the dosage forms can be prepared by methods which include the step of bringing the therapeutic agents into association with a carrier, which constitutes one or more accessory ingredients. For example, the formulations are prepared by uniformly and intimately bringing the therapeutic agent into association with a liquid carrier, a finely divided solid carrier, or both, and then, if necessary, shaping the product into dosage forms of the desired formulation (e.g., wet or dry granulation, powder blends, etc., followed by press tableting).

[0209] In another aspect, a pharmaceutical composition can include a pharmaceutically acceptable carrier. As used herein, a “pharmaceutically acceptable carrier” refers to a non-toxic solvent, dispersant, excipient, adjuvant, or other material which is mixed with a live bacterium in order to permit the formation of a pharmaceutical composition, e.g., a dosage form capable of administration to the patient. A pharmaceutically acceptable carrier can be liquid (e.g., saline), gel or solid form of diluents, adjuvant, excipients or an acid resistant encapsulated ingredient. Suitable diluents and excipients include pharmaceutical grades of physiological saline, dextrose, glycerol, mannitol, lactose, starch, magnesium stearate, sodium saccharin, cellulose, magnesium carbonate, and the like, and a combination thereof. In another aspect, a pharmaceutical composition can contain auxiliary substances such as wetting or emulsifying agents, stabilizing or pH buffering agents. In an aspect, a pharmaceutical composition contains about 1%-5%, 5%-10%, 10%-15%, 15-20%, 20%-25%, 25-30%, 30-35%, 40-45%, 50%-55%, 1%-95%, 2%-95%, 5%-95%, 10%-95%, 15%-95%, 20%-95%, 25%-95%, 30%-95%, 35%-95%, 40%-95%, 45%-95%, 50%-95%, 55%-95%, 60%-95%, 65%-95%, 70%-95%, 45%-95%, 80%-95%, or 85%-95% of active ingredient. In an aspect, a pharmaceutical composition contains about 2%-70%, 5%-60%, 10%-50%, 15%-40%, 20%-30%, 25%-60%, 30%-60%, or 35%-60% of active ingredient.

[0210] In an aspect, a pharmaceutical composition can include or be incorporated into tablets, drenches, boluses, capsules or premixes. Formulation of these active ingredients into such dosage forms can be accomplished by means of methods well known in the pharmaceutical formulation arts. See, e.g., U.S. Pat. No. 4,394,377. Filling gelatin capsules with any desired form of the active ingredients readily produces capsules. If desired, these materials can be diluted with an inert powdered diluent, such as sugar, starch, powdered milk, purified crystalline cellulose, or the like to increase the volume for convenience of filling capsules.

[0211] In an aspect, for preparing solid compositions such as tablets, an active ingredient is mixed with a pharmaceutical carrier, e.g., conventional tableting ingredients such as cornstarch, lactose, sucrose, sorbitol, talc, stearic acid, magnesium stearate, dicalcium phosphate or gums, or other pharmaceutical diluents, e.g. water, to form a solid preformulation composition containing a homogeneous mixture of a composition described herein. When referring to these preformulation compositions as homogeneous, it is meant that the active ingredient is dispersed evenly throughout the composition so that the composition can be readily subdivided into equally effective unit dosage forms such as tablets, pills and capsules. This solid preformulation composition is then subdivided into unit dosage forms of the type described above containing a desired amount of an active ingredient (e.g., at least about 10⁵, 10⁶, 10⁷, 10⁸, 10⁹, 10¹⁰, 10¹¹, 10¹², or 10¹³ CFUs). A pharmaceutical composition described herein can be flavored.

[0212] In an aspect, a pharmaceutical composition comprising a bacterial mixture described herein (and optionally one or more additional therapeutic agents) is formulated as a composition adapted for a mode of administration described herein.

[0213] In various aspects, the administration of the pharmaceutical compositions is any one of oral, intravenous, intraperitoneal, and parenteral. For example, routes of administration include, but are not limited to, oral, intraperitoneal, intravenous, intramuscular, or rectal. In various aspects, the administration of the pharmaceutical compositions is oral, naso-gastric, antegrade gastrointestinal, retrograde gastrointestinal, endoscopic, or enema.

[0214] In an aspect, a pharmaceutical composition described herein can be formulated as a composition adapted for oral administration. Compositions for oral delivery can be in the form of tablets, lozenges, aqueous or oily suspensions, granules, powders, sprinkles, emulsions, capsules, syrups, or elixirs, for example. Orally administered compositions can comprise one or more agents, for example, sweetening agents such as fructose, aspartame or saccharin; flavoring agents such as peppermint, oil of wintergreen, or cherry; coloring agents; and preserving agents, to provide a pharmaceutically palatable preparation. Moreover, where in tablet or pill form, the compositions can be coated to delay disintegration to provide sustained delivery of the bacterial mixture over an extended period of time. Selectively permeable membranes surrounding an osmotically active agent are also suitable for orally administered compositions. In these latter platforms, fluid from the environment surrounding the capsule is imbibed by a driving compound, which swells to displace the agent or agent composition through an aperture. These delivery platforms can provide an essentially zero order delivery profile as opposed to the spiked profiles of immediate release formulations. A time-delay material, such as glycerol monostearate or glycerol stearate, can also be useful. Oral compositions can include standard excipients such as mannitol, lactose, starch, magnesium stearate, sodium saccharin, cellulose, ethacrylic acid and derivative polymers thereof, and magnesium carbonate. In an aspect, the excipients are of pharmaceutical grade. Suspensions, in addition to the active compounds, can contain suspending agents such as, for example, ethoxylated isostearyl alcohols, polyoxyethylene sorbitol and sorbitan esters, microcrystalline cellulose, aluminum metahydroxide, bentonite, agar-agar, tragacanth, etc., and mixtures thereof.

[0215] In various aspects, a pharmaceutical composition is formulated as a solid dosage form such as a tablets, dispersible powder, granule, or capsule. In an aspect, the pharmaceutical composition is formulated as a capsule. In another aspect, the pharmaceutical composition is formulated as a tablet. In yet another aspect, the pharmaceutical composition is formulated as a soft-gel capsule. In a further aspect, the pharmaceutical composition is formulated as a gelatin capsule.

[0216] In an aspect, a pharmaceutical composition is in the form of an enema composition which can be reconstituted with an appropriate diluent; an enteric-coated capsule; an enteric-coated microcapsule; an acid-resistant tablet; an acid-resistant capsules; an acid-resistant microcapsule; powder for reconstitution with an appropriate diluent for naso-enteric infusion or colonoscopic infusion; powder for reconstitution with appropriate diluent, flavoring and gastric acid suppression agent for oral ingestion; powder for reconstitution with food or drink; or food or food supplement comprising enteric-coated and/or acid-resistant microcapsules of the composition, powder, jelly, or liquid.

[0217] In various aspects, formulations can additionally comprise a pharmaceutically acceptable carrier or excipient. As one skilled in the art will recognize, the formulations can be in any suitable form appropriate for the desired use and route of administration.

[0218] In some dosage forms, a pharmaceutical composition described herein is mixed with at least one inert, pharmaceutically acceptable excipient or carrier such as sodium citrate, dicalcium phosphate, etc., and/or a) fillers or extenders such as starches, lactose, sucrose, glucose, mannitol, silicic acid, microcrystalline cellulose, and Bakers Special Sugar, etc., b) binders such as, for example, carboxymethylcellulose, alginates, gelatin, polyvinylpyrrolidone, sucrose, acacia, polyvinyl alcohol, polyvinylpyrrolidone, methylcellulose, hydroxypropyl cellulose (HPC), and hydroxymethyl cellulose etc., c) humectants such as glycerol, etc., d) disintegrating agents such as agar-agar, calcium carbonate, potato or tapioca starch, alginic acid, certain silicates, sodium carbonate, cross-linked polymers such as crospovidone (cross-linked polyvinylpyrrolidone), croscarmellose sodium (cross-linked sodium carboxymethylcellulose), sodium starch glycolate, etc., e) solution retarding agents such as paraffin, etc., f) absorption accelerators such as quaternary ammonium compounds, etc., g) wetting agents such as, for example, cetyl alcohol and glycerol monostearate, etc., h) absorbents such as kaolin and bentonite clay, etc., and i) lubricants such as talc, calcium stearate, magnesium stearate, solid polyethylene glycols, sodium lauryl sulfate, glyceryl behenate, etc., and mixtures of such excipients. One of skill in the art will recognize that particular excipients can have two or more functions in the oral dosage form. In the case of an oral dosage form, for example, a capsule or a tablet, the dosage form can also comprise buffering agents.

[0219] In an aspect, a pharmaceutical composition comprising a bacterial mixture is combined with one or more pharmaceutically acceptable cryoprotectants, lyoprotectants, binders, disintegrants, excipients, fillers, and/or preservatives, acid suppressants, antacids, H2 antagonists, and proton pump inhibitors, or combinations thereof.

[0220] In an aspect, a pharmaceutical composition comprising a bacterial mixture is combined with other adjuvants such as antacids to dampen bacterial inactivation in the stomach. (e.g., Mylanta, Mucaine, Gastrogel). In another aspect, acid secretion in the stomach could also be pharmacologically suppressed using H2-antagonists or proton pump inhibitors. An example H2-antagonist is ranitidine. An example proton pump inhibitor is omeprazole. In one aspect, an acid suppressant is administered prior to administering, or in co-administration with, a pharmaceutical composition.

[0221] In one aspect, a pharmaceutical composition administered herein further comprises an acid suppressant, an antacid, an H2 antagonist, a proton pump inhibitor or a combination thereof. In one aspect, a pharmaceutical composition administered herein is substantially free of non-living matter. In another aspect, a pharmaceutical composition administered herein substantially free of acellular material selected from the group consisting of residual fiber, DNA, viral coat material, and non-viable material. In another aspect, a pharmaceutical composition administered does not comprise an acid suppressant, an antacid, an H2 antagonist, a proton pump inhibitor or a combination thereof. In yet another aspect, a pharmaceutical composition administered does not comprise an acid suppressant. In another aspect, a pharmaceutical composition administered does not comprise an antacid. In another aspect, a pharmaceutical composition administered does not comprise an H2 antagonist. In another aspect, a pharmaceutical composition administered does not comprise a proton pump inhibitor. In another aspect, a pharmaceutical composition administered does not comprise metoclopramide.

[0222] In an aspect, a bacterial mixture is dry or powdered, e.g., when it includes lyophilized bacterial cells/spores or comprises dry binders, fillers, and dispersants. Alternately, the bacterial mixture can be aqueous, e.g., when it comprises non-dry binders, fillers, and dispersants.

[0223] In an aspect, a bacterial mixture described herein can be subject to lyophilization or spray drying. As used herein, “lyophilization” or “freeze drying” refers to the process of drying a material by first freezing it and then encouraging the ice within it to sublimate in a vacuum environment.

[0224] In one aspect, a bacterial mixture comprises a lyophilized or spray dried formulation further comprising a reducing agent and/or antioxidant. In certain aspects, the reducing agent comprises cysteine selected from the group consisting of D-cysteine and L-cysteine. In another aspect, cysteine is at a concentration of at least about 0.025%. In one aspect, cysteine is at a concentration of about 0.025%. In another aspect, cysteine is at a concentration of 0.025%. In another aspect, another reducing agent other than cysteine is used in lieu of, or in combination with cysteine. In an aspect, another reducing agent is selected from the group comprising ascorbic acid, sodium ascorbate, thioglycolic acid, sodium sulfite, sodium bisulfite, sodium metabisulfite, potassium metabisulfite, glutathione, methionine, thioglycerol, and alpha tocopherol.

[0225] In one aspect, cysteine is at a concentration of at least about 0.005%, at least about 0.01%, at least about 0.015%, at least about 0.02%, at least about 0.025%, at least about 0.03%, at least about 0.035%, at least about 0.04%, at least about 0.045%, at least about 0.05%, at least about 0.055%, at least about 0.06%, at least about 0.065%, at least about 0.07%, at least about 0.075%, at least about 0.08%, at least about 0.085%, at least about 0.09%, at least about 0.095%, at least about 0.1%, at least about 0.12%, at least about 0.14%, at least about 0.16%, at least about 0.18%, at least about 0.2%, at least about 0.25%, at least about 0.3%, at least about 0.4%, at least about 0.5%, at least about 0.6%, at least about 0.7%, at least about 0.8%, at least about 0.9%, at least about 1%, at least about 2%, at least about 4%, at least about 6%, at least about 8%, at least about 10%, at least about 12%, at least about 14%, at least about 16%, at least about 18%, at least about 20%, at least about 22%, at least about 24%, or at least about 26%.

[0226] In one aspect, a bacterial mixture comprises a cryoprotectant or mixture of cryoprotectants. As used herein, a “cryoprotectant” refers to a substance that is added to a formulation in order to protect an active ingredient during freezing. For example, a cryoprotectant can comprise, consist essentially of, or consist of polyethylene glycol, skim milk, erythritol, arabitol, sorbitol, glucose, fructose, alanine, glycine, proline, sucrose, lactose, ribose, trehalose, dimethyl sulfoxide (DMSO) or equivalent, a glycerol, a polyethylene glycol (PEG) or equivalent, or an amino acid (e.g., alanine, glycine, proline). In an aspect of the present disclosure, a cryoprotectant can be selected from the group comprising 5% Sucrose; 10% Sucrose; 10% Skim milk; 10% Trehalose with 2.5% sucrose; 5% Trehalose with 2.5% sucrose; 5% Mannitol; 5% Mannitol with 0.1% Polysorbate 80; 10% Mannitol; 10% Mannitol with 0.1% Polysorbate 80; 5% Trehalose; 5% Trehalose with 0.1% Polysorbate 80; 10% Trehalose; and 10% Trehalose with 0.1% Polysorbate 80.

[0227] In an aspect, a bacterial mixture comprises a lyoprotectant. As used herein, a “lyoprotectant” refers to a substance that is added to a formulation in order to protect an active ingredient during lyophilization. In one aspect, the same substance or the same substance combination is used as both a cryoprotectant and a lyoprotectant. Exemplary lyoprotectants include sugars such as sucrose or trehalose; an amino acid such as monosodium glutamate or histidine; a methylamine such as betaine; a lyotropic salt such as magnesium sulfate; a polyol such as trihydric or higher sugar alcohols, e.g. glycerin, erythritol, glycerol, arabitol, xylitol, sorbitol, and mannitol; propylene glycol; polyethylene glycol; Pluronics; and a combination thereof. In an aspect, a lyoprotectant is a non-reducing sugar, such as trehalose or sucrose. In an aspect, a cryoprotectant or a lyoprotectant consists essentially of, or consists of, one or more substances mentioned in this paragraph and the paragraph above.

[0228] In an aspect, a cryoprotectant or a lyoprotectant comprise an intracellular agent, e.g., DMSO, Glycerol, or PEG, which penetrates inside the cell preventing the formation of ice crystals that could result in membrane rupture. In an aspect, a cryoprotectant or a lyoprotectant comprise an extracellular agent, e.g., sucrose, trehalose, or dextrose, which does not penetrate into the cell membrane but acts to improve the osmotic imbalance that occurs during freezing.

[0229] In an aspect, a bacterial mixture incorporated into a pharmaceutical composition is in the form of a powder. In an aspect, a powdered formulation of bacteria is produced by lyophilizing or spray drying a liquid formulation comprising the bacteria and a saline or buffer.

[0230] In one aspect, the present disclosure provides a pharmaceutical composition comprising a lyophilized fecal microbe preparation comprising a lyophilization formulation comprising at least about 12.5% trehalose.

[0231] In an aspect, a lyophilized formulation comprises trehalose. In an aspect, a lyophilized formulation comprises 2% to 30%, 3% to 25%, 4% to 20%, 5% to 15%, 6% to 10%, 2% to 30%, 2% to 25%, 2% to 20%, 2% to 15%, or 2% to 10% trehalose. In an aspect, a lyophilized formulation comprises at least 2%, 3%, 4%, 5%, 6%, 7%, 8%, 9%, 10%, or 15% trehalose. In an aspect, a lyophilized formulation comprises at most 2%, 3%, 4%, 5%, 6%, 7%, 8%, 9%, 10%, or 15% trehalose. In another aspect, a lyophilized formulation comprises about 5% trehalose. In another aspect, a lyophilized formulation comprises trehalose and sucrose. In another aspect, a lyophilized formulation comprises between about 8% and 12% trehalose with between about 1.5% and 3.5% sucrose and between about 0.5% and 1.5% NaCl.

[0232] In one aspect, a lyophilization formulation comprises at least about 5%, at least about 7.5%, at least about 10%, at least about 12.5%, at least about 13%, at least about 13.5%, at least about 14%, at least about 14.5%, at least about 15%, at least about 15.5%, at least about 16%, at least about 16.5%, at least about 17%, at least about 17.5%, at least about 18%, at least about 18.5%, at least about 19%, at least about 19.5%, at least about 20%, at least about 22.5%, at least about 25%, at least about 27.5%, at least about 30%, at least about 32.5%, at least about 35%, at least about 37.5%, at least about 40%, at least about 42.5%, at least about 45%, at least about 47.5%, at least about 50%, at least about 52.5%, at least about 55%, at least about 57.5%, or at least about 60% of trehalose.

[0233] In an aspect, a pharmaceutical composition provided herein, after at least 12 weeks of storage at ambient temperature or lower, is effective for treating or preventing a disorder in a patient by delivering one or more bile acid transforming bacteria to an intestine of the patient. In an aspect, a pharmaceutical composition remains effective after at least 4, 8, 10, 16, 20, 24, 30, 40, 50, 60, 70, 80 or 100 weeks of storage at ambient temperature or lower.

[0234] In an aspect, a bacterial mixture can be prepared by spray drying a liquid formulation comprising fecal bacteria, for example a consortium of fecal bacteria or a bacterial isolate. In an aspect, a consortium of fecal bacteria is processed by homogenizing the bacteria in a liquid comprising a buffer and spray drying the homogenized bacteria to form a powder. In an aspect, the liquid formulation is not frozen prior to spray drying.

[0235] In an aspect, a pharmaceutical composition described herein can be lyophilized or freeze dried or spray dried and stored at ambient temperatures (e.g., room temperature), at a freezing temperature, or at between about 2° C. and 8° C. In an aspect, freeze-drying allows the majority of cells to remain viable, and produces a powdered form of the product that can be gently pulverized into a powder. The powder, or lyophilized or freeze-dried composition, then can be encapsulated into a carrier, e.g., a tablet, geltab, pill or capsule, e.g., an enteric-coated capsule, or placed into oil-filled capsules for ingestion. Alternatively, the freeze-dried or lyophilized product, or powder, can be reconstituted at ambient temperatures before delivery to an individual in e.g., a fluid, e.g., a sterile fluid, such as saline, a buffer or a media such as a fluid-glucose-cellobiose agar (RGCA) media.

[0236] For freeze-drying, in an aspect, bacteria are held in a liquid that will prevent bursting of cells on thawing. This can include various stabilizers, e.g., glycerol and appropriate buffers, and/or ethylene glycol. In an aspect, the cryoprotecting process uses final concentrations of stabilizer(s) of between about 10% and 80%, 20% and 70%, 30% and 60%, or 40% and 50%, depending on the stabilizer(s) used; in an aspect, this helps stabilize proteins by preventing formation of ice crystals that would otherwise destroy protein structures.

[0237] In an aspect, stabilizers that help reduce destruction of living bacteria include skim milk, erythritol, arabitol, sorbitol, glucose, fructose and other polyols. Polymers such as dextran and polyethylene glycol can also be used to stabilize bacterial cells.

[0238] In an aspect, manufacturing a pharmaceutical composition can comprise steps of: (1) coating the exterior of a dissociated capsule (i.e., comprising separate capsule body and capsule cap) with the exterior enteric coating, (2) filling the capsule body with a bacterial mixture (e.g., comprising a bacterial isolate and/or a consortium of fecal bacteria), and (3) closing the capsule cap over the capsule body, thereby encapsulating the bacterial mixture in the enteric-coated capsule.

[0239] Optionally, manufacturing a pharmaceutical composition can comprise steps of: (1) coating the exterior of a dissociated capsule (i.e., comprising separate capsule body and capsule cap) with the exterior enteric coating, (2) coating the interior of the dissociated capsule with an interior coating, (3) filling the capsule body with a bacterial mixture (e.g., comprising a bacterial isolate and/or a consortium of fecal bacteria), and (4) closing the capsule cap over the capsule body, thereby encapsulating the bacterial mixture in the dual-coated capsule.

[0240] Alternately, manufacturing a pharmaceutical composition can comprise step of: (1) coating the interior of the dissociated capsule (i.e., comprising separate capsule body and capsule cap) with an interior coating, (2) coating the exterior of a dissociated capsule with the exterior enteric coating, (3) filling the capsule body with a bacterial mixture (e.g., comprising a bacterial isolate and/or a consortium of fecal bacteria), and (4) closing the capsule cap over the capsule body, thereby encapsulating the bacterial mixture in the dual-coated capsule.

[0241] In an aspect, one or more additional therapeutic agents can be included in a pharmaceutical composition, and encapsulated by the capsule.

[0242] In an aspect, the bodies and caps of gelatin capsules (e.g., size #00) are separated. An exterior enteric coating suspension is prepared by dispersing one or more enteric coating polymers along with other components in a solution. The exterior enteric coating suspension is applied to the exterior of separated capsule bodies and caps, e.g., using a fluid bed Wurster column coater, Fluid Bed Coater, or an equivalent). The capsules are fluidized in the product bowl and the exterior enteric coating suspension is sprayed to produce the outer coating to a target of between about 2 mg/cm2 and 6 mg/cm2, e.g., 3 mg/cm2. After completion of this step, the capsules are set to dry, e.g., between about 8 hours and 24 hours. After drying, exemplary capsules are weighed to calculate weight gain from the exterior enteric coating. Capsules can be inspected for irregularities.

[0243] In an aspect, EUDRAGIT® S100 (poly(methacrylic acid, methylmethacrylate)), starch, triethyl citrate, and PlasACRYL™ T20 are dissolved in a solution of water, ethanol, and n-butanol, mixed, and then charged to a suitable spraying device. The solution is then spray coated on the outer surface of the capsule bodies and capsule caps to a target weight gain. The capsule bodies and capsule caps are allowed to dry for about 8 hours to about 24 hours, or longer, e.g., for a week, a month, or more, before further procession, e.g., filling with a bacterial mixture.

[0244] In an aspect, it may be desirable to provide an amount of the bacterial mixture to a capsule's cap in addition to providing the composition in the capsule's body. In this aspect, more of the composition will be included in a capsule and/or less air will be contained in a closed capsule.

[0245] In an aspect, the interior surface of a capsule comprises an internal coating.

[0246] Any of the above-described compositions and materials (e.g., bacterial mixtures, inner coatings, capsules, and outer coatings) can be combined into a pharmaceutical composition described herein. A skilled artisan would know how to select an inner coating; capsule, and outer coating according to his/her present need, which could be based, for example, on a specific bacterial isolate(s) incorporated into a bacterial mixture of the composition and/or the desired delivery location in a subject (e.g., in the colon or small intestine, including the ileum, jejunum or duodenum) of a component of the bacterial mixture (e.g. comprising a bacterial isolate and/or a consortium of fecal bacteria and/or an additional therapeutic agent).

[0247] Additional relevant teachings are disclosed in WO 2007122374, which is hereby incorporated herein by reference in its entirety.

[0248] In an aspect, during the manufacture of a pharmaceutical composition, a pharmaceutically-acceptable cryoprotectant, lyoprotectant, binder, disintegrant, filler, preservative, acid suppressant, antacid, H2 antagonist, and proton pump inhibitor, or combination thereof can be mixed into the pharmaceutical composition (e.g., comprising a bacterial mixture) to promote desirable properties.

[0249] In an aspect, the pharmaceutical composition comprises a surface-active agent. Surface active agents suitable for use include, but are not limited to, any pharmaceutically acceptable, non-toxic surfactant. Classes of surfactants suitable for use include, but are not limited to, polyethoxylated fatty acids, PEG-fatty acid diesters, PEG-fatty acid mono- and di-ester mixtures, polyethylene glycol glycerol fatty acid esters, alcohol-oil transesterification products, polyglycerized fatty acids, propylene glycol fatty acid esters, mixtures of propylene glycol esters-glycerol esters, mono- and diglycerides, sterol and sterol derivatives, polyethylene glycol sorbitan fatty acid esters, polyethylene glycol alkyl ethers, sugar esters, polyethylene glycol alkyl phenols, polyoxyethylene-olyoxypropylene block copolymers, sorbitan fatty acid esters, lower alcohol fatty acid esters, ionic surfactants, and mixtures thereof. In some aspects, compositions can comprise one or more surfactants including, but not limited to, sodium lauryl sulfate, polysorbate 20, polysorbate 40, polysorbate 60, polysorbate 80, and triethyl citrate.

[0250] In an aspect, the pharmaceutical composition comprises pharmaceutically acceptable plasticizers to obtain the desired mechanical properties such as flexibility and hardness. Such plasticizers include, but are not limited to, triacetin, citric acid esters, triethyl citrate, phthalic acid esters, dibutyl sebacate, cetyl alcohol, polyethylene glycols, polysorbates or other plasticizers.

[0251] In another aspect, the pharmaceutical composition comprises one or more application solvents. Some of the more common solvents that can be used to apply, for example, a delayed-release coating composition include isopropyl alcohol, acetone, methylene chloride and the like.

[0252] In yet another aspect, the pharmaceutical composition comprises one or more alkaline materials. Alkaline material suitable for use in compositions include, but are not limited to, sodium, potassium, calcium, magnesium and aluminum salts of acids such as phosphoric acid, carbonic acid, citric acid and other aluminum/magnesium compounds. In addition, the alkaline material can be selected from antacid materials such as aluminum hydroxides, calcium hydroxides, magnesium hydroxides and magnesium oxide.

[0253] Besides inert diluents, the orally administered compositions can also include adjuvants such as sweetening, flavoring, and perfuming agents.

[0254] In various aspects, the pharmaceutical compositions are formulated for systemic or local delivery. In an aspect, administration is systemic. In another aspect, it may be desirable to administer locally to the area in need of treatment.

[0255] Various methods can be used to formulate and/or deliver a pharmaceutical composition (e.g., comprising a bacterial mixture and/or additional therapeutic agent) described herein to a location of interest. For example, the pharmaceutical compositions can be formulated for delivery to the gastrointestinal (GI) tract. The GI tract includes organs of the digestive system such as mouth, esophagus, stomach, small intestine, duodenum, jejunum, ileum, large intestine and rectum and includes all subsections thereof (e.g. the small intestine may include the duodenum, jejunum and ileum; the large intestine may include the colon transversum, colon descendens, colon ascendens, colon sigmoidenum and cecum). For example, the compositions can be formulated for delivery of one or more active agents to one or more of the stomach, small intestine, large intestine and rectum, or any subsection thereof (e.g. duodenum, jejunum and ileum, colon transversum, colon descendens, colon ascendens, colon sigmoidenum and cecum). In some aspects, the compositions described herein can be formulated for delivery of one or more active agents to the upper or lower GI tract. In an aspect, a composition can be administered to a subject, by, for example, directly or indirectly contacting the mucosal tissues of the GI tract with the composition.

[0256] In various aspects, the administration of the pharmaceutical compositions is into the GI tract via, for example, oral delivery, nasogastral tube, intestinal intubation (e.g. an enteral tube or feeding tube such as, for example, a jejunal tube or gastro-jejunal tube, etc.), direct infusion (e.g., duodenal infusion), endoscopy, colonoscopy, or enema.

[0257] In one aspect, a method comprises administering a pharmaceutical composition orally, by enema, or via rectal suppository. In one aspect, a pharmaceutical composition administered herein is formulated as an enteric coated (and/or acid-resistant) capsule or microcapsule, or formulated as part of or administered together with a food, a food additive, a dairy-based product, a soy-based product or a derivative thereof, a jelly, a gelatin-based chewable (e.g., gummy), flavored liquid, ice block, ice cream, or a yogurt. In another aspect, a pharmaceutical composition administered herein is formulated as an acid-resistant enteric coated capsule. A pharmaceutical composition can be provided as a powder for sale in combination with a food or drink. A food or drink can be a dairy-based product or a soy-based product. In another aspect, a food or food supplement contains enteric-coated and/or acid-resistant microcapsules containing a pharmaceutical composition.

[0258] In an aspect, a pharmaceutical composition comprises a liquid culture. In another aspect, a pharmaceutical composition is homogenized, lyophilized, pulverized and powdered. It can then be infused, dissolved such as in saline, as an enema. Alternatively, the powder can be encapsulated as enteric-coated and/or acid-resistant delayed release capsules for oral administration. In an aspect, the powder can be double encapsulated with acid-resistant/delayed release capsules for oral administration. These capsules can take the form of enteric-coated and/or acid-resistant delayed release microcapsules. A powder can be provided in a palatable form for reconstitution for drinking or for reconstitution as a food additive. In a further aspect, a food is yogurt. In one aspect, a powder can be reconstituted to be infused via naso-duodenal infusion.

[0259] In another aspect, a pharmaceutical composition administered herein is in a liquid, frozen, freeze-dried, spray-dried, foam-dried, lyophilized, or powder form. In a further aspect, a pharmaceutical composition administered herein is formulated as a delayed or gradual enteric release form. In another aspect, a pharmaceutical composition administered herein comprises an excipient, a saline, a buffer, a buffering agent, or a fluid-glucose-cellobiose agar (RGCA) media. In another aspect, a pharmaceutical composition administered herein comprises a cryoprotectant. In one aspect, a cryoprotectant comprises polyethylene glycol, skim milk, erythritol, arabitol, sorbitol, glucose, fructose, alanine, glycine, proline, sucrose, lactose, ribose, trehalose, dimethyl sulfoxide (DMSO), glycerol, or a combination thereof.

[0260] In various aspects, provided herein are modified-release formulations comprising a bacterial mixture (e.g., comprising a bacterial isolate and/or a consortium of fecal bacteria), wherein the formulation releases a substantial amount of the bacterial mixture (and optionally additional therapeutic agents) into one or more regions of the GI tract. For example, the formulation can release at least about 60% of the bacterial isolates after the stomach and into one or more regions of the GI tract.

[0261] In various aspects, the modified-release formulation can release at least 60% of the bacterial mixture (and optionally additional therapeutic agents) after the stomach into one or more regions of the intestine. For example, the modified-release formulation can release at least 60%, at least 61%, at least 62%, at least 63%, at least 64%, at least 65%, at least 66%, at least 67%, at least 68%, at least 69%, at least 70%, at least 71%, at least 72%, at least 73%, at least 74%, at least 75%, at least 76%, at least 77%, at least 78%, at least 79%, at least 80%, at least 81%, at least 82%, at least 83%, at least 84%, at least 85%, at least 86%, at least 87%, at least 88%, at least 89%, at least 90%, at least 91%, at least 92%, at least 93%, at least 94%, at least 95%, at least 96%, at least 97%, at least 98%, at least 99%, or 100% of the bacterial mixture (and optionally additional therapeutic agents) in the intestines.

[0262] In various aspects, the modified-release formulation can release at least 60% of the bacterial mixture (and optionally additional therapeutic agents) in the small intestine. For example, the modified-release formulation can release at least 60%, at least 61%, at least 62%, at least 63%, at least 64%, at least 65%, at least 66%, at least 67%, at least 68%, at least 69%, at least 70%, at least 71%, at least 72%, at least 73%, at least 74%, at least 75%, at least 76%, at least 77%, at least 78%, at least 79%, at least 80%, at least 81%, at least 82%, at least 83%, at least 84%, at least 85%, at least 86%, at least 87%, at least 88%, at least 89%, at least 90%, at least 91%, at least 92%, at least 93%, at least 94%, at least 95%, at least 96%, at least 97%, at least 98%, at least 99%, or 100% of the bacterial mixture (and optionally additional therapeutic agents) in the small intestine (e.g., one or more of duodenum, jejunum, ileum, and ileocecal junction).

[0263] In various aspects, the modified-release formulation can release at least 60% of the bacterial mixture (and optionally additional therapeutic agents) in the large intestine. For example, the modified-release formulation can release at least 60%, at least 61%, at least 62%, at least 63%, at least 64%, at least 65%, at least 66%, at least 67%, at least 68%, at least 69%, at least 70%, at least 71%, at least 72%, at least 73%, at least 74%, at least 75%, at least 76%, at least 77%, at least 78%, at least 79%, at least 80%, at least 81%, at least 82%, at least 83%, at least 84%, at least 85%, at least 86%, at least 87%, at least 88%, at least 89%, at least 90%, at least 91%, at least 92%, at least 93%, at least 94%, at least 95%, at least 96%, at least 97%, at least 98%, at least 99%, or 100% of the bacterial isolates (and/or additional therapeutic agents) in the large intestine (e.g., one or more of cecum, ascending, transverse, descending or sigmoid portions of the colon, and rectum).

[0264] In some aspects, the pharmaceutical composition is formulated for release in the stomach. In other aspects, the pharmaceutical composition is formulated so as to not substantially release the bacterial mixture in the stomach.

[0265] In certain aspects, the modified-release formulation releases the bacterial mixture (and optionally additional therapeutic agents) at a specific pH. For example, in some aspects, the modified-release formulation is substantially stable in an acidic environment and substantially unstable (e.g., dissolves rapidly or is physically unstable) in a near neutral to alkaline environment. In some aspects, stability is indicative of not substantially releasing while instability is indicative of substantially releasing. For example, in some aspects, the modified-release formulation is substantially stable at a pH of about 7.0 or less, or about 6.5 or less, or about 6.0 or less, or about 5.5 or less, or about 5.0 or less, or about 4.5 or less, or about 4.0 or less, or about 3.5 or less, or about 3.0 or less, or about 2.5 or less, or about 2.0 or less, or about 1.5 or less, or about 1.0 or less. In some aspects, the present formulations are stable in lower pH areas and therefore do not substantially release in, for example, the stomach. In some aspects, modified-release formulation is substantially stable at a pH of about 1 to about 4 or lower and substantially unstable at pH values that are greater. In these aspects, the modified-release formulation does not substantially release in the stomach. In these aspects, the modified-release formulation substantially releases in the small intestine (e.g. one or more of the duodenum, jejunum, and ileum) and/or large intestine (e.g. one or more of the cecum, ascending colon, transverse colon, descending colon, and sigmoid colon). In some aspects, modified-release formulation is substantially stable at a pH of about 4 to about 5 or lower and consequentially is substantially unstable at pH values that are greater and therefore is not substantially released in the stomach and/or small intestine (e.g. one or more of the duodenum, jejunum, and ileum). In these aspects, the modified-release formulation substantially releases in the large intestine (e.g. one or more of the cecum, ascending colon, transverse colon, descending colon, and sigmoid colon). In various aspects, the pH values recited herein can be adjusted as known in the art to account for the state of the subject, e.g. whether in a fasting or postprandial state.

[0266] In some aspects, the modified-release formulation is substantially stable in gastric fluid and substantially unstable in intestinal fluid and, accordingly, is substantially released in the small intestine (e.g. one or more of the duodenum, jejunum, and ileum) and/or large intestine (e.g. one or more of the cecum, ascending colon, transverse colon, descending colon, and sigmoid colon).

[0267] In some aspects, the modified-release formulation is stable in gastric fluid or stable in acidic environments. These modified-release formulations release about 30% or less by weight of the pharmaceutical composition (e.g., comprising a bacterial mixture) in the modified-release formulation in gastric fluid with a pH of about 4 to about 5 or less, or simulated gastric fluid with a pH of about 4 to about 5 or less, in about 15, or about 30, or about 45, or about 60, or about 90 minutes. Modified-release formulations of can release from about 0% to about 30%, from about 0% to about 25%, from about 0% to about 20%, from about 0% to about 15%, from about 0% to about 10%, about 5% to about 30%, from about 5% to about 25%, from about 5% to about 20%, from about 5% to about 15%, from about 5% to about 10% by weight of the composition in the modified-release formulation in gastric fluid with a pH of 4-5, or less or simulated gastric fluid with a pH of 4-5 or less, in about 15, or about 30, or about 45, or about 60, or about 90 minutes. Modified-release formulations can release about 1%, about 2%, about 3%, about 4%, about 5%, about 6%, about 7%, about 8%, about 9%, or about 10% by weight of the total composition in the modified-release formulation in gastric fluid with a pH of 5 or less, or simulated gastric fluid with a pH of 5 or less, in about 15, or about 30, or about 45, or about 60, or about 90 minutes.

[0268] In some aspects, the modified-release formulation is unstable in intestinal fluid. These modified-release formulations release about 70% or more by weight of the bacterial mixture and/or additional therapeutic agent in the modified-release formulation in intestinal fluid or simulated intestinal fluid in about 15, or about 30, or about 45, or about 60, or about 90 minutes. In some aspects, the modified-release formulation is unstable in near neutral to alkaline environments. These modified-release formulations release about 70% or more by weight of the bacterial mixture and/or additional therapeutic agent in the modified-release formulation in intestinal fluid with a pH of about 4-5 or greater, or simulated intestinal fluid with a pH of about 4-5 or greater, in about 15, or about 30, or about 45, or about 60, or about 90 minutes. A modified-release formulation that is unstable in near neutral or alkaline environments can release 70% or more by weight of the pharmaceutical composition (e.g., comprising a microbial cocktail) in the modified-release formulation in a fluid having a pH greater than about 5 (e.g., a fluid having a pH of from about 5 to about 14, from about 6 to about 14, from about 7 to about 14, from about 8 to about 14, from about 9 to about 14, from about 10 to about 14, or from about 11 to about 14) in from about 5 minutes to about 90 minutes, or from about 10 minutes to about 90 minutes, or from about 15 minutes to about 90 minutes, or from about 20 minutes to about 90 minutes, or from about 25 minutes to about 90 minutes, or from about 30 minutes to about 90 minutes, or from about 5 minutes to about 60 minutes, or from about 10 minutes to about 60 minutes, or from about 15 minutes to about 60 minutes, or from about 20 minutes to about 60 minutes, or from about 25 minutes to about 90 minutes, or from about 30 minutes to about 60 minutes.

[0269] Examples of simulated gastric fluid and simulated intestinal fluid include, but are not limited to, those disclosed in the 2005 Pharmacopeia 23NF/28USP in Test Solutions at page 2858 and/or other simulated gastric fluids and simulated intestinal fluids known to those of skill in the art, for example, simulated gastric fluid and/or intestinal fluid prepared without enzymes.

[0270] In various aspects, the modified-release formulation can be substantially stable in chyme. For example, there is, in some aspects, a loss of less about 50% or about 40%, or about 30%, or about 20%, or about 10% of the activity or viability of the bacteria in the bacterial mixture in about 10, or 9, or 8, or 7, or 6, or 5, or 4, or 3, or 2, or 1 hour from administration.

[0271] In various aspects, the modified-release formulations can be designed for immediate release (e.g. upon ingestion). In various aspects, the modified-release formulations can have sustained-release profiles, i.e. slow release of the active ingredient(s) in the body (e.g., GI tract) over an extended period of time. In various aspects, the modified-release formulations can have a delayed-release profile, i.e. not immediately release the active ingredient(s) upon ingestion; rather, postponement of the release of the active ingredient(s) until the composition is lower in the GI tract; for example, for release in the small intestine (e.g., one or more of duodenum, jejunum, ileum) or the large intestine (e.g., one or more of cecum, ascending, transverse, descending or sigmoid portions of the colon, and rectum). For example, a composition can be enteric coated to delay release of the active ingredient(s) until it reaches the small intestine or large intestine.

[0272] In various aspects, the modified-release formulations can utilize one or more modified-release coatings such as delayed-release coatings to provide for effective, delayed yet substantial delivery of the bacterial mixture to the GI tract together with, optionally, additional therapeutic agents.

[0273] In an aspect, the delayed-release coating includes an enteric agent that is substantially stable in acidic environments and substantially unstable in near neutral to alkaline environments. In an aspect, the delayed-release coating contains an enteric agent that is substantially stable in gastric fluid. The enteric agent can be selected from, for example, solutions or dispersions of methacrylic acid copolymers, cellulose acetate phthalate, hydroxypropylmethyl cellulose phthalate, polyvinyl acetate phthalate, carboxymethylethylcellulose, and EUDRAGIT®-type polymer (poly(methacrylic acid, methylmethacrylate), hydroxypropyl methylcellulose acetate succinate, cellulose acetate trimellitate, shellac or other suitable enteric coating polymers. The EUDRAGIT®-type polymers include, for example, EUDRAGIT® FS 30D, L 30 D-55, L 100-55, L 100, L 12,5, L 12,5 P, RL 30 D, RL PO, RL 100, RL 12,5, RS 30 D, RS PO, RS 100, RS 12,5, NE 30 D, NE 40 D, NM 30 D, S 100, S 12, 5, and S 12,5 P. Similar polymers include Kollicoat® MAE 30 DP and Kollicoat® MAE 100 P. In some aspects, one or more of EUDRAGIT® FS 30D, L 30 D-55, L 100-55, L 100, L 12,5, L 12,5 P RL 30 D, RL PO, RL 100, RL 12,5, RS 30 D, RS PO, RS 100, RS 12,5, NE 30 D, NE 40 D, NM 30 D, S 100, S 12,5 S 12,5 P, Kollicoat® MAE 30 DP and Kollicoat® MAE 100 P is used. In various aspects, the enteric agent can be a combination of the foregoing solutions or dispersions.

[0274] In certain aspects, one or more coating system additives are used with the enteric agent. For example, one or more PlasACRYL™ additives can be used as an anti-tacking agent coating additive. Illustrative PlasACRYL™ additives include, but are not limited to, PlasACRYL™ HTP20 and PlasACRYL™ T20.

[0275] In another aspect, the delayed-release coating can degrade as a function of time when in aqueous solution without regard to the pH and/or presence of enzymes in the solution. Such a coating can comprise a water insoluble polymer. Its solubility in aqueous solution is therefore independent of the pH. The term “pH independent” as used herein means that the water permeability of the polymer and its ability to release pharmaceutical ingredients is not a function of pH and/or is only very slightly dependent on pH. Such coatings can be used to prepare, for example, sustained release formulations. Suitable water insoluble polymers include pharmaceutically acceptable non-toxic polymers that are substantially insoluble in aqueous media, e.g., water, independent of the pH of the solution. Suitable polymers include, but are not limited to, cellulose ethers, cellulose esters, or cellulose ether-esters, i.e., a cellulose derivative in which some of the hydroxy groups on the cellulose skeleton are substituted with alkyl groups and some are modified with alkanoyl groups. Examples include ethyl cellulose, acetyl cellulose, nitrocellulose, and the like. Other examples of insoluble polymers include, but are not limited to, lacquer, and acrylic and/or methacrylic ester polymers, polymers or copolymers of acrylate or methacrylate having a low quaternary ammonium content, or mixture thereof and the like. Other examples of insoluble polymers include EUDRAGIT RS®, EUDRAGIT RL®, and EUDRAGIT NE®. Insoluble polymers can include polyvinyl esters, polyvinyl acetals, polyacrylic acid esters, butadiene styrene copolymers, and the like. In an aspect, colonic delivery is achieved by use of a slowly eroding wax plug (e.g., various PEGS, including for example, PEG6000).

[0276] In a further aspect, the delayed-release coating can be degraded by a microbial enzyme present in the gut flora. In an aspect, the delayed-release coating can be degraded by bacteria present in the small intestine. In another aspect, the delayed-release coating can be degraded by bacteria present in the large intestine.

[0277] In various aspects, the modified release formulation can be designed for release in the colon. Various colon-specific delivery approaches can be utilized. For example, the modified release formulation can be formulated using a colon-specific drug delivery system (CODES) as described for example, in Li et al., AAPS PharmSciTech (2002), 3(4). 1-9, the entire contents of which are incorporated herein by reference. Drug release in such a system is triggered by colonic microflora coupled with pH-sensitive polymer coatings. For example, the formulation can be designed as a core tablet with three layers of polymer. The first coating is an acid-soluble polymer (e.g., EUDRAGIT E), the outer coating is enteric, along with a hydroxypropyl methylcellulose barrier layer interposed in between. In another aspect, colon delivery can be achieved by formulating the pharmaceutical composition (e.g., comprising a microbial cocktail) with specific polymers that degrade in the colon such as, for example, pectin. The pectin can be further gelled or crosslinked with a cation such as a zinc cation. In an aspect, the formulation is in the form of ionically crosslinked pectin beads which are further coated with a polymer (e.g., EUDRAGIT polymer). Additional colon specific formulations include, but are not limited to, pressure-controlled drug delivery systems (prepared with, for example, ethylcellulose) and osmotic controlled drug delivery systems (i.e., ORDS-CT).

[0278] Formulations for colon specific delivery of the bacterial mixture (and/or additional therapeutic agents), as described herein, can be evaluated using, for example, in vitro dissolution tests. For example, parallel dissolution studies in different buffers can be undertaken to characterize the behavior of the formulations at different pH levels. Alternatively, in vitro enzymatic tests can be carried out. For example, the formulations can be incubated in fermenters containing suitable medium for bacteria, and the amount of drug released at different time intervals is determined. Drug release studies can also be done in buffer medium containing enzymes or rat or guinea pig or rabbit cecal contents and the amount of drug released in a particular time is determined. In a further aspect, in vivo evaluations can be carried out using animal models such as dogs, guinea pigs, rats, and pigs. Further, clinical evaluation of colon specific drug delivery formulations can be evaluated by calculating drug delivery index (DDI) which considers the relative ratio of RCE (relative colonic tissue exposure to the drug) to RSC (relative amount of drug in blood i.e. that is relative systemic exposure to the drug). Higher drug DDI indicates better colon drug delivery. Absorption of drugs from the colon can be monitored by colonoscopy and intubation.

[0279] In various aspects, the present formulations provide for substantial uniform delivery of the bacterial mixture (and/or additional therapeutic agent) in the area of release in the GI tract. In an aspect, the present formulations minimize patchy or heterogeneous release of the bacterial mixture.

[0280] In various aspects, the present formulations provide for release of multiple doses of one or more bacterial mixtures along the GI tract. For example, the composition and/or formulation can release multiple doses of the same bacterial mixture at different locations along the intestines, at different times, and/or at different pH. Alternatively, the composition and/or formulation can release a dose of different bacterial mixtures at different locations along the intestines, at different times, and/or at a different pH. In an aspect, the pharmaceutical composition comprises a first bacterial mixture comprising one or more bacterial isolates that is released at a first location in the intestine, and a second bacterial mixture comprising a consortium of fecal bacteria that is released at a second location in the intestine. In an aspect, the first bacterial mixture is released in the ileum, and the second bacterial mixture is released in the colon.

[0281] The overall release profile of such a formulation can be adjusted using, for example, multiple particle types or multiple layers. For example, in an aspect, a first bacterial mixture (or first dose of a bacterial mixture) can be formulated for release in, for example, the small intestine (e.g., one or more of duodenum, jejunum, ileum), whereas the second bacterial mixture (or second dose of the bacterial mixture) is formulated for delayed release in, for example, the large intestine (e.g., one or more of cecum, ascending, transverse, descending or sigmoid portions of the colon, and rectum). In another example, the first bacterial mixture (or first dose of a bacterial mixture) can be formulated for release in, for example, the small intestine (e.g., one or more of duodenum, jejunum, ileum), whereas the second bacterial mixture (or second dose of a bacterial mixture) is formulated for delayed release in, for example, another part of the small intestine (e.g., one or more of duodenum, jejunum, ileum). In another aspect, the first bacterial mixture (or first dose of a bacterial mixture) can be formulated for release in, for example, the large intestine (e.g., one or more of cecum, ascending, transverse, descending or sigmoid portions of the colon, and rectum), whereas the second bacterial mixture (or second dose of the bacterial mixture) is formulated for delayed release in, for example, another part of the large intestine (e.g., one or more of cecum, ascending, transverse, descending or sigmoid portions of the colon, and rectum). In various aspects, the composition and/or formulation can release at least one dose, at least two doses, at least three doses, at least four doses, or at least five doses of the bacterial mixture at different locations along the intestines, at different times, and/or at different pH. Likewise, in various aspects, the composition and/or formulation can release at least one bacterial mixture, at least two bacterial mixtures, at least three bacterial mixtures, at least four bacterial mixtures, or at least five bacterial mixtures at different locations along the intestines, at different times, and/or at different pH.

[0282] In another aspect, a delayed or gradual enteric release formulation comprises the use of a bilayer tablet or capsule which comprises a first layer comprising a polyalkylene oxide, a polyvinylpyrrolidone, a lubricant, or a mixture thereof, and a second osmotic push layer comprising polyethylene oxide, carboxy-methylcellulose, or both. In an aspect, a delayed or gradual enteric release formulation comprises the use of a release-retarding matrix material selected from the group consisting of an acrylic polymer, a cellulose, a wax, a fatty acid, shellac, zein, hydrogenated vegetable oil, hydrogenated castor oil, polyvinylpyrrolidine, a vinyl acetate copolymer, a vinyl alcohol copolymer, polyethylene oxide, an acrylic acid and methacrylic acid copolymer, a methyl methacrylate copolymer, an ethoxyethyl methacrylate polymer, a cyanoethyl methacrylate polymer, an aminoalkyl methacrylate copolymer, a poly(acrylic acid), a poly(methacrylic acid), a methacrylic acid alkylamide copolymer, a poly(methyl methacrylate), a poly(methacrylic acid anhydride), a methyl methacrylate polymer, a polymethacrylate, a poly(methyl methacrylate) copolymer, a polyacrylamide, an aminoalkyl methacrylate copolymer, a glycidyl methacrylate copolymer, a methyl cellulose, an ethylcellulose, a carboxymethylcellulose, a hydroxypropylmethylcellulose, a hydroxymethyl cellulose, a hydroxyethyl cellulose, a hydroxypropyl cellulose, a crosslinked sodium carboxymethylcellulose, a crosslinked hydroxypropylcellulose, a natural wax, a synthetic wax, a fatty alcohol, a fatty acid, a fatty acid ester, a fatty acid glyceride, a hydrogenated fat, a hydrocarbon wax, stearic acid, stearyl alcohol, beeswax, glycowax, castor wax, carnauba wax, a polylactic acid, polyglycolic acid, a co-polymer of lactic and glycolic acid, carboxymethyl starch, potassium methacrylate/divinylbenzene copolymer, crosslinked polyvinylpyrrolidone, poly inylalcohols, polyvinylalcohol copolymers, polyethylene glycols, non-crosslinked polyvinylpyrrolidone, polyvinylacetates, polyvinylacetate copolymers, or any combination thereof. In an aspect, a delayed or gradual enteric release formulation comprises the use of a microenvironment pH modifier.

[0283] It will be understood that a pharmaceutical composition described herein can comprise multiple distinct bacterial mixtures, for example to achieve different delivery location profiles for each bacterial mixture. In an aspect, a pharmaceutical composition comprises at least two bacterial mixtures, such that a first bacterial mixture comprises one or more bacterial isolates and a second bacterial mixture comprises a consortium of fecal bacteria. In an aspect, the second bacterial mixture further comprises one or more bacterial isolates that are different than the bacterial isolate(s) in the first bacterial mixture. Alternatively, the second bacterial mixture can consist essentially of the consortium of fecal bacteria. In another aspect, the first bacterial mixture can comprise only one bacterial isolate. A pharmaceutical composition can comprise any number of bacterial mixtures, for example one, two, three, four, five, six, seven, eight, nine, ten, or more than ten bacterial mixtures that each contain a different bacterial isolate, a different combination of bacterial isolates, a consortium of fecal bacteria, or a different combination of a consortium of fecal bacteria with one or more bacterial isolates.

[0284] In an aspect, a pharmaceutical composition can be a drench. In one aspect, a drench is prepared by choosing a saline-suspended form of a pharmaceutical composition. A water-soluble form of one ingredient can be used in conjunction with a water-insoluble form of the other by preparing a suspension of one with an aqueous solution of the other. Water-insoluble forms of either active ingredient may be prepared as a suspension or in some physiologically acceptable solvent such as polyethylene glycol. Suspensions of water-insoluble forms of either active ingredient can be prepared in oils such as peanut, corn, sesame oil or the like; in a glycol such as propylene glycol or a polyethylene glycol; or in water depending on the solubility of a particular active ingredient. Suitable physiologically acceptable adjuvants may be necessary in order to keep the active ingredients suspended. Adjuvants can include and be chosen from among the thickeners, such as carboxymethylcellulose, polyvinyl pyrrolidone, gelatin and the alginates. Surfactants generally will serve to suspend the active ingredients, particularly the fat-soluble propionate-enhancing compounds. Most useful for making suspensions in liquid nonsolvents are alkylphenol polyethylene oxide adducts, naphthalenesulfonates, alkylbenzene-sulfonates, and the polyoxyethylene sorbitan esters. In addition many substances, which affect the hydrophilicity, density and surface tension of the liquid, can assist in making suspensions in individual cases. For example, silicone anti-foams, glycols, sorbitol, and sugars can be useful suspending agents.

[0285] In some aspects, one or more bacterial isolates described herein are in the form of live, vegetative cells. In some aspects, one or more bacterial isolates described herein are in the form of spores. In some aspects, one or more bacterial isolates described herein are lyophilized. By way of non-limiting example, lyophilization can be via methods known in the art, including those described in U.S. Pat. No. 7,799,328, the contents of which are hereby incorporated by reference in their entirety. In some aspects, lyophilized bacterial mixtures described herein are placed in an enterically coated soft gel or capsule.

[0286] In various aspects, formulations can take the form of those described in one or more of U.S. Pat. Nos. 8,535,713 and 8,911,777 and US Patent Publication Nos. 20120141585, 20120141531, 2006/001896, 2007/0292523, 2008/0020018, 2008/0113031, 2010/0203120, 2010/0255087, 2010/0297221, 2011/0052645, 2013/0243873, 2013/0330411, 2014/0017313, and 2014/0234418, the contents of which are hereby incorporated by reference in their entirety.

[0287] In various aspects, formulations can take the form of those as described in International Patent Publication No. WO 2008/135090, the contents of which are hereby incorporated by reference in their entirety.

[0288] In various aspects, formulations can take the form of those described in one or more of U.S. Pat. Nos. 4,196,564; 4,196,565; 4,247,006; 4,250,997; 4,268,265; 5,317,849; 6,572,892; 7,712,634; 8,074,835; 8,398,912; 8,440,224; 8,557,294; 8,646,591; 8,739,812; 8,810,259; 8,852,631; and 8,911,788 and US Patent Publication Nos. 2014/0302132; 2014/0227357; 20140088202; 20130287842; 2013/0295188; 2013/0307962; and 20130184290, the contents of which are hereby incorporated by reference in their entirety.

### Administration and Dosage

[0289] It will be appreciated that the dose of a pharmaceutical composition or the bacterial cells therein (e.g., a bacterial mixture comprising one or more bacterial isolates and/or a consortium of fecal bacteria) will vary according to, for example, the particular dosage form, the mode of administration to a subject, the identity of a bacterial isolate, if any, in the composition, the number of bacterial isolates, if any, in the composition. These factors, as well as variables that may modify the activity of the bacteria in a bacterial mixture (e.g., subject body weight, sex and diet, time of administration, route of administration, rate of excretion, condition of the subject, drug combinations, genetic disposition and reaction sensitivities) can be taken into account by those skilled in the art to generate an effective dose or dosage regime for treatment or prevention of at least one symptom of a disorder described herein (e.g., a disorder associated with a gut dysbiosis that can be treated or prevented by administering one or more bile acid transforming bacteria). Administration can be carried out continuously or in one or more discrete doses within the maximum tolerated dose. Optimal administration rates for a given set of conditions can be ascertained by those skilled in the art using conventional dosage administration tests.

[0290] In various aspects, the dose of the pharmaceutical composition or the bacterial cells therein (e.g., a bacterial mixture comprising one or more bacterial isolates and/or a consortium of fecal bacteria) is effective to modulate a patient's microbiome to favor an ecological balance, so as to treat or prevent one or more symptoms of a disorder associated with a gut dysbiosis (e.g., by delivering one or more bile acid transforming bacteria to the intestine of the patient).

[0291] In one aspect, a pharmaceutically active or therapeutically effective dose of a bacterial isolate administered to a subject (i.e., in single or multiple administrations) to treat at least one symptom of a disorder (e.g., a disorder associated with a gut dysbiosis that can be treated or prevented by administration of at least one bile acid transforming bacteria) comprises at least 10⁵, at least 10⁶, at least 10⁷, at least 10⁸, at least 10⁹, at least 10¹⁰, at least 10¹¹, at least 10¹², at least 10¹³, at least 10¹⁴, or at least 10¹⁵ CFUs of the bacterial isolate. In another aspect, a pharmaceutically active or therapeutically effective dose of a bacterial isolate administered to a subject (i.e., in single or multiple administrations) to treat at least one symptom of a disorder (e.g., a disorder associated with a gut dysbiosis that can be treated or prevented by administration of at least one bile acid transforming bacteria) comprises at most 10⁵, at most 10⁶, at most 10⁷, at most 10⁸, at most 10⁹, at most 10¹⁰, at most 10¹¹, at most 10¹², at most 10¹³, at most 10¹⁴, or at most 10¹⁵ CFUs of the bacterial isolate. In a further aspect, a pharmacologically active or therapeutically effective dose of a bacterial isolate administered to a subject (i.e., in single or multiple administrations) to treat at least one symptom of a disorder (e.g., a disorder associated with a gut dysbiosis that can be treated or prevented by administration of at least one bile acid transforming bacteria) is selected from the group consisting of: from 10⁸ CFUs to 10¹⁴ CFUs, from 10⁹ CFUs to 10¹³ CFUs, from 10¹⁰ CFUs to 10¹² CFUs, from 10¹⁰ CFUs to 10¹¹ CFUs, from 10⁹ CFUs to 10¹⁴ CFUs, from 10⁹ CFUs to 10¹² CFUs, from 10⁹ CFUs to 10¹¹ CFUs, from 10⁹ CFUs to 10¹⁰ CFUs, from 10¹⁰ CFUs to 10¹⁴ CFUs, from 10¹⁰ CFUs to 10¹³ CFUs, from 10¹¹ CFUs to 10¹⁴ CFUs, from 10¹¹ CFUs to 10¹³ CFUs, from 10¹² CFUs to 10¹⁴ CFUs, and from 10¹³ CFUs to 10¹⁴ CFUs of the bacterial isolate.

[0292] In an aspect, a pharmaceutical composition comprises one or more bacterial isolates, with each bacterial isolate present in each unit dose at one of the foregoing pharmaceutically active or therapeutically effective doses in a unit weight of about 0.2, 0.4, 0.6, 0.8 or 1.0 gram, or a unit volume of about 0.2, 0.4, 0.6, 0.8 or 1.0 milliliter.

[0293] In one aspect, a pharmaceutically active or therapeutically effective dose of a bacterial isolate administered to a subject (i.e., in single or multiple administrations) to treat at least one symptom of a disorder comprises at least 10⁵, at least 10⁶, at least 10⁷, at least 10⁸, at least 10⁹, at least 10¹⁰, at least 10¹¹, at least 10¹², at least 10¹³, at least 10¹⁴, or at least 10¹⁵ cells or spores of the bacterial isolate. In another aspect, a pharmaceutically active or therapeutically effective dose of a bacterial isolate administered to a subject i.e. in single or multiple administrations) to treat at least one symptom of a disorder comprises at most 10⁵, at most 10⁶, at most 10⁷, at most 10⁸, at most 10⁹, at most 10¹⁰, at most 10¹¹, at most 10¹², at most 10¹³, at most 10¹⁴, or at most 10¹⁵ total cells or spores of the bacterial isolate. In a further aspect, a pharmacologically active or therapeutically effective dose of a bacterial isolate administered to a subject (i.e., in single or multiple administrations) to treat at least one symptom of a disorder (e.g., a disorder associated with a gut dysbiosis that can be treated or prevented by administration of at least one bile acid transforming bacteria) is selected from the group consisting of: from 10⁸ to 10¹⁴, from 10⁹ to 10¹³, from 10¹⁰ to 10¹², from 10¹⁰ to 10¹¹, from 10⁹ to 10¹⁴, from 10⁹ to 10¹², from 10⁹ to 10¹¹, from 10⁹ to 10¹⁰, from 10¹⁰ to 10¹⁴, from 10¹⁰ to 10¹³, from 10¹¹ to 10¹⁴, from 10¹¹ to 10¹³, from 10¹² to 10¹⁴, and from 10¹³ to 10¹⁴ cells or spores of the bacterial isolate.

[0294] In an aspect, the pharmaceutically active or therapeutically effective dose cell count of a bacterial isolate is directed to live cells. In one aspect, a pharmaceutical composition comprises one or more bacterial isolates, with each bacterial isolates present in each dosage unit at one of the foregoing pharmaceutically active or therapeutically effective doses in a unit weight of about 0.2, 0.4, 0.6, 0.8 or 1.0 gram, or a unit volume of about 0.2, 0.4, 0.6, 0.8 or 1.0 milliliter.

[0295] In an aspect, a pharmaceutical composition described herein is in the form of a capsule, and each capsule comprises at least 10⁵, at least 10⁶, at least 10⁷, at least 10⁸, at least 10⁹, at least 10¹⁰, at least 10¹¹, at least 10¹², at least 10¹³, at least 10¹⁴, or at least 10¹⁵ cells or spores of a bacterial isolate. In an aspect, a pharmaceutical composition described herein is in the form of a capsule, and each capsule comprises from 10⁸ to 10¹⁴, from 10⁹ to 10¹³, from 10¹⁰ to 10¹², from 10¹⁰ to 10¹¹, from 10⁹ to 10¹⁴, from 10⁹ to 10¹², from 10⁹ to 10¹¹, from 10⁹ to 10¹⁰, from 10¹⁰ to 10¹⁴, from 10¹⁰ to 10¹³, from 10¹¹ to 10¹⁴, from 10¹¹ to 10¹³, from 10¹² to 10¹⁴, or from 10¹³ to 10¹⁴ cells or spores of a bacterial isolate.

[0296] In one aspect, a pharmaceutically active or therapeutically effective dose of a consortium of fecal bacteria administered to a subject (i.e., in single or multiple administrations) to treat at least one symptom of a disorder (e.g., associated with a gut dysbiosis) comprises at least 10⁵, at least 10⁶, at least 10⁷, at least 10⁸, at least 10⁹, at least 10¹⁰, at least 10¹¹, at least 10¹², at least 10¹³, at least 10¹⁴, or at least 10¹⁵ CFUs of the consortium of fecal bacteria. In another aspect, a pharmaceutically active or therapeutically effective dose of a consortium of fecal bacteria administered to a subject (i.e., in single or multiple administrations) to treat at least one symptom of a disorder (e.g., associated with a gut dysbiosis) comprises at most 10⁵, at most 10⁶, at most 10⁷, at most 10⁸, at most 10⁹, at most 10¹⁰, at most 10¹¹, at most 10¹², at most 10¹³, at most 10¹⁴, or at most 10¹⁵ CFUs of the consortium of fecal bacteria. In a further aspect, a pharmacologically active or therapeutically effective dose of a consortium of fecal bacteria administered to a subject (i.e., in single or multiple administrations) to treat at least one symptom of a disorder (e.g., associated with a gut dysbiosis) is selected from the group consisting of: from 10⁸ CFUs to 10¹⁴ CFUs, from 10⁹ CFUs to 10¹³ CFUs, from 10¹⁰ CFUs to 10¹² CFUs, from 10¹⁰ CFUs to 10¹¹ CFUs, from 10⁹ CFUs to 10¹⁴ CFUs, from 10⁹ CFUs to 10¹² CFUs, from 10⁹ CFUs to 10¹¹ CFUs, from 10⁹ CFUs to 10¹⁰ CFUs, from 10¹⁰ CFUs to 10¹⁴ CFUs, from 10¹⁰ CFUs to 10¹³ CFUs, from 10¹¹ CFUs to 10¹⁴ CFUs, from 10¹¹ CFUs to 10¹³ CFUs, from 10¹² CFUs to 10¹⁴ CFUs, and from 10¹³ CFUs to 10¹⁴ CFUs of the consortium of fecal bacteria.

[0297] In an aspect, a consortium of fecal bacteria are present in each unit dose of a pharmaceutical composition at one of the foregoing pharmaceutically active or therapeutically effective doses in a unit weight of about 0.2, 0.4, 0.6, 0.8 or 1.0 gram, or a unit volume of about 0.2, 0.4, 0.6, 0.8 or 1.0 milliliter.

[0298] In one aspect, a pharmaceutically active or therapeutically effective dose of a consortium of fecal bacteria administered to a subject (i.e., in single or multiple administrations) to treat at least one symptom of a disorder (e.g., associated with a gut dysbiosis) comprises at least 10⁵, at least 10⁶, at least 10⁷, at least 10⁸, at least 10⁹, at least 10¹⁰, at least 10¹¹, at least 10¹², at least 10¹³, at least 10¹⁴, or at least 10¹⁵ cells or spores of the consortium of fecal bacteria. In another aspect, a pharmaceutically active or therapeutically effective dose of a consortium of fecal bacteria administered to a subject i.e. in single or multiple administrations) to treat at least one symptom of a disorder (e.g., associated with a gut dysbiosis) comprises at most 10⁵, at most 10⁶, at most 10⁷, at most 10⁸, at most 10⁹, at most 10¹⁰, at most 10¹¹, at most 10¹², at most 10¹³, at most 10¹⁴, or at most 10¹⁵ total cells or spores of the preparation of a consortium of fecal bacteria. In a further aspect, a pharmacologically active or therapeutically effective dose of a preparation of a consortium of fecal bacteria administered to a subject (i.e., in single or multiple administrations) to treat at least one symptom of a disorder (e.g., associated with a gut dysbiosis) is selected from the group consisting of: from 10⁸ to 10¹⁴, from 10⁹ to 10¹³, from 10¹⁰ to 10¹², from 10¹⁰ to 10¹¹, from 10⁹ to 10¹⁴, from 10⁹ to 10¹², from 10⁹ to 10¹¹, from 10⁹ to 10¹⁰, from 10¹⁰ to 10¹⁴, from 10¹⁰ to 10¹³, from 10¹¹ to 10¹⁴, from 10¹¹ to 10¹³, from 10¹² to 10¹⁴, and from 10¹³ to 10¹⁴ cells or spores of the consortium of fecal bacteria.

[0299] In an aspect, the pharmaceutically active or therapeutically effective dose cell count of a consortium of fecal bacteria is directed to live cells. In one aspect, a consortium of fecal bacteria is present in each unit dose of a pharmaceutical composition at one of the foregoing pharmaceutically active or therapeutically effective doses in a unit weight of about 0.2, 0.4, 0.6, 0.8 or 1.0 gram, or a unit volume of about 0.2, 0.4, 0.6, 0.8 or 1.0 milliliter.

[0300] In an aspect, a pharmaceutical composition described herein is in the form of a capsule, and each capsule comprises at least 10⁵, at least 10⁶, at least 10⁷, at least 10⁸, at least 10⁹, at least 10¹⁰, at least 10¹¹, at least 10¹², at least 10¹³, at least 10¹⁴, or at least 10¹⁵ cells or spores of a consortium of fecal bacteria. In an aspect, a pharmaceutical composition described herein is in the form of a capsule, and each capsule comprises from 10⁸ to 10⁴, from 10⁹ to 10¹³, from 10¹⁰ to 10¹², from 10¹⁰ to 10¹¹, from 10⁹ to 10¹⁴, from 10⁹ to 10¹², from 10⁹ to 10¹¹, from 10⁹ to 10¹⁰, from 10¹⁰ to 10¹⁴, from 10¹⁰ to 10¹³, from 10¹¹ to 10¹⁴, from 10¹¹ to 10¹³, from 10¹² to 10¹⁴, or from 10¹³ to 10¹⁴ cells or spores of a consortium of fecal bacteria.

[0301] A subject can be administered one or more bacterial isolates (e.g., comprising at least one bile acid transforming bacteria) combined with a consortium of fecal bacteria for treatment of one or more symptoms of a disorder (e.g., a disorder associated with a gut dysbiosis that can be treated or prevented by administration of at least one bile acid transforming bacteria). In such cases, the bacterial isolate(s) and consortium of fecal bacteria can be administered to the subject together in the same pharmaceutical composition, or in separate compositions. Further, a pharmaceutical composition (e.g., comprising one or more bacterial isolates, a consortium of fecal bacteria, or both) can be administered to the subject in a single unit dose or multiple unit doses, for example as part of a dosage regime. In an aspect, the dosage of the consortium of fecal bacteria (e.g. measured by CFU or cell/spore count) administered to a subject is greater than the dosage of the bacterial isolate. Alternatively, the consortium of fecal bacteria (e.g. measured by CFU or cell/spore count) administered to the subject can be less than the dosage of the bacterial isolate. In another aspect, the dosage of the consortium of fecal bacteria (e.g. measured by CFU or cell/spore count) can be about the same as the dosage of the bacterial isolate. For example, in an aspect a subject can be administered a bacterial isolate (e.g. comprising at least one bile acid transforming bacteria) at a dosage of about 10¹⁰ cells and a consortium of fecal bacteria at a dosage of about 10¹⁰ cells to treat or prevent one or more symptoms of a disorder described herein.

[0302] In an aspect, the number of cells of a bacterial isolate (e.g., comprising at least one bile acid transforming bacteria) administered to a subject to treat one or more symptoms of a disorder described herein (e.g., a disorder associated with a gut dysbiosis that can be treated or prevented by administration of at least one bile acid transforming bacteria) is about the same or greater than the total number of cells of a consortium of fecal bacteria administered to the subject. Alternatively, the number of cells of a bacterial isolate administered to a subject to treat one or more symptoms of a disorder (e.g., a disorder associated with a gut dysbiosis that can be treated or prevented by administration of at least one bile acid transforming bacteria) can be about the same or less than the total number of cells of a consortium of fecal bacteria administered to the subject.

[0303] In an aspect, a pharmaceutical composition comprises a bacterial mixture that comprises multiple bacterial isolates (e.g., at least one of which comprises one or more bile acid transforming bacteria). In another aspect, at least two bacterial isolates are present at about the same amount or dosage (e.g., about the same number of viable cells or spores, or about the same CFUs). In another aspect, at least three bacterial isolates, at least four bacterial isolates, at least five bacterial isolates, at least six bacterial isolates, at least seven bacterial isolates, at least eight bacterial isolates, at least nine bacterial isolates, at least ten bacterial isolates, or more than ten bacterial isolates are present in the pharmaceutical composition at about the same amount or dosage (e.g., about the same number of viable cells or spores, or about the same CFUs). In another aspect, all of the bacterial isolates in a bacterial mixture are present in about the same amounts.

[0304] In an aspect, a pharmaceutical composition comprises a bacterial mixture comprising multiple bacterial isolates, and at least two of the multiple bacterial isolates are present at different amounts or dosages (e.g., different numbers of viable cells or spores, or different CFUs). In another aspect, at least three, at least four, at least five, at least six, at least seven, at least eight, at least nine, at least ten, or more than ten bacterial isolates are present in the bacterial mixture at different amounts or dosages.

[0305] A pharmaceutical composition can comprise a bacterial mixture comprising multiple bacterial isolates (e.g., at least one of which comprising a bile acid transforming bacteria) in combination with a consortium of fecal bacteria. In an aspect, each bacterial isolate is present in the composition at an amount or dosage that is greater than the amount or dosage of the consortium of fecal bacteria (e.g., measured as numbers of viable cells or spores, or CFUs). In another aspect, each bacterial isolate is present in the composition at an amount or dosage that is less than the amount or dosage of the consortium of fecal bacteria (e.g., measured as numbers of viable cells or spores, or CFUs). In another aspect, at least one bacterial isolate is present in the composition at an amount or dosage that is greater than the amount or dosage of the consortium of fecal bacteria, and at least one bacterial isolate is present in the composition at an amount or dosage that is less than the amount or dosage of the consortium of fecal bacteria (e.g., measured as numbers of viable cells or spores, or CFUs).

[0306] In an aspect, a pharmaceutical composition comprises one or more bacterial isolates at an amount or dosage which is at or above the minimum amount or dosage of the bacterial isolate required to be administered to a subject for engraftment of the bacterial isolate to occur in the intestine of the subject. For example, a minimum dosage of the bacterial isolate required for engraftment of the bacterial isolate into the intestine of the subject can be at least 10⁶ cells, at least 10⁷ cells, at least 10⁸ cells, at least 10⁹ cells, at least 10¹⁰ cells, at least 10¹¹ cells, or at least 10¹² cells. In an aspect a first and second bacterial isolate of a microbial cocktail engraft in the intestine of a subject at different minimal dosages or amounts, and a dosage or amount of each of the first and second bacterial isolate in the microbial cocktail varies corresponding to the respective minimal dosage or amount required for engraftment of the respective bacterial isolate.

[0307] Individual doses of the pharmaceutical composition (e.g., comprising a bacterial mixture) can be administered in unit dosage forms (e.g., tablets or capsules) containing, for example, from about 0.01 mg to about 5,000 mg, from about 0.01 mg to about 4,000 mg, from about 0.01 mg to about 3,000 mg, from about 0.01 mg to about 2,000 mg, from about 0.01 mg to about 1,000 mg, from about 0.01 mg to about 950 mg, from about 0.01 mg to about 900 mg, from about 0.01 mg to about 850 mg, from about 0.01 mg to about 800 mg, from about 0.01 mg to about 750 mg, from about 0.01 mg to about 700 mg, from about 0.01 mg to about 650 mg, from about 0.01 mg to about 600 mg, from about 0.01 mg to about 550 mg, from about 0.01 mg to about 500 mg, from about 0.01 mg to about 450 mg, from about 0.01 mg to about 400 mg, from about 0.01 mg to about 350 mg, from about 0.01 mg to about 300 mg, from about 0.01 mg to about 250 mg, from about 0.01 mg to about 200 mg, from about 0.01 mg to about 150 mg, from about 0.01 mg to about 100 mg, from about 0.1 mg to about 90 mg, from about 0.1 mg to about 80 mg, from about 0.1 mg to about 70 mg, from about 0.1 mg to about 60 mg, from about 0.1 mg to about 50 mg, from about 0.1 mg to about 40 mg, from about 0.1 mg to about 30 mg, from about 0.1 mg to about 20 mg, from about 0.1 mg to about 10 mg, from about 0.1 mg to about 5 mg, from about 0.1 mg to about 3 mg, from about 0.1 mg to about 1 mg of the active ingredient per unit dosage form, or from about 5 mg to about 80 mg per unit dosage form. For example, a unit dosage form can include about 0.01 mg, about 0.02 mg, about 0.03 mg, about 0.04 mg, about 0.05 mg, about 0.06 mg, about 0.07 mg, about 0.08 mg, about 0.09 mg, about 0.1 mg, about 0.2 mg, about 0.3 mg, about 0.4 mg, about 0.5 mg, about 0.6 mg, about 0.7 mg, about 0.8 mg, about 0.9 mg, about 1 mg, about 2 mg, about 3 mg, about 4 mg, about 5 mg, about 6 mg, about 7 mg, about 8 mg, about 9 mg about 10 mg, about 15 mg, about 20 mg, about 25 mg, about 30 mg, about 35 mg, about 40 mg, about 45 mg, about 50 mg, about 55 mg, about 60 mg, about 65 mg, about 70 mg, about 75 mg, about 80 mg, about 85 mg, about 90 mg, about 95 mg, about 100 mg, about 150 mg, about 200 mg, about 250 mg, about 300 mg, about 350 mg, about 400 mg, about 450 mg, about 500 mg, about 550 mg, about 600 mg, about 650 mg, about 700 mg, about 750 mg, about 800 mg, about 850 mg, about 900 mg, about 950 mg, about 1,000 mg, about 2,000 mg, about 3,000 mg, about 4,000 mg, or about 5,000 mg of the active ingredient, inclusive of all values and ranges therebetween.

[0308] In an aspect, the pharmaceutical composition (e.g., comprising a bacterial mixture) is administered at an amount of from about 0.01 mg to about 100 mg daily, an amount of from about 0.01 mg to about 5,000 mg daily, about 0.01 mg to about 4,000 mg daily, about 0.01 mg to about 3,000 mg daily, about 0.01 mg to about 2,000 mg daily, about 0.01 mg to about 1,000 mg daily, from about 0.01 mg to about 950 mg daily, from about 0.01 mg to about 900 mg daily, from about 0.01 mg to about 850 mg daily, from about 0.01 mg to about 800 mg daily, from about 0.01 mg to about 750 mg daily, from about 0.01 mg to about 700 mg daily, from about 0.01 mg to about 650 mg daily, from about 0.01 mg to about 600 mg daily, from about 0.01 mg to about 550 mg daily, from about 0.01 mg to about 500 mg daily, from about 0.01 mg to about 450 mg daily, from about 0.01 mg to about 400 mg daily, from about 0.01 mg to about 350 mg daily, from about 0.01 mg to about 300 mg daily, from about 0.01 mg to about 250 mg daily, from about 0.01 mg to about 200 mg daily, from about 0.01 mg to about 150 mg daily, from about 0.1 mg to about 100 mg daily, from about 0.1 mg to about 95 mg daily, from about 0.1 mg to about 90 mg daily, from about 0.1 mg to about 85 mg daily, from about 0.1 mg to about 80 mg daily, from about 0.1 mg to about 75 mg daily, from about 0.1 mg to about 70 mg daily, from about 0.1 mg to about 65 mg daily, from about 0.1 mg to about 60 mg daily, from about 0.1 mg to about 55 mg daily, from about 0.1 mg to about 50 mg daily, from about 0.1 mg to about 45 mg daily, from about 0.1 mg to about 40 mg daily, from about 0.1 mg to about 35 mg daily, from about 0.1 mg to about 30 mg daily, from about 0.1 mg to about 25 mg daily, from about 0.1 mg to about 20 mg daily, from about 0.1 mg to about 15 mg daily, from about 0.1 mg to about 10 mg daily, from about 0.1 mg to about 5 mg daily, from about 0.1 mg to about 3 mg daily, from about 0.1 mg to about 1 mg daily, or from about 5 mg to about 80 mg daily. In various aspects, the bacterial mixture (and/or additional therapeutic agents) is administered at a daily dose of about 0.01 mg, about 0.02 mg, about 0.03 mg, about 0.04 mg, about 0.05 mg, about 0.06 mg, about 0.07 mg, about 0.08 mg, about 0.09 mg, about 0.1 mg, about 0.2 mg, about 0.3 mg, about 0.4 mg, about 0.5 mg, about 0.6 mg, about 0.7 mg, about 0.8 mg, about 0.9 mg, about 1 mg, about 2 mg, about 3 mg, about 4 mg, about 5 mg, about 6 mg, about 7 mg, about 8 mg, about 9 mg about 10 mg, about 15 mg, about 20 mg, about 25 mg, about 30 mg, about 35 mg, about 40 mg, about 45 mg, about 50 mg, about 55 mg, about 60 mg, about 65 mg, about 70 mg, about 75 mg, about 80 mg, about 85 mg, about 90 mg, about 95 mg, about 100 mg, about 150 mg, about 200 mg, about 250 mg, about 300 mg, about 350 mg, about 400 mg, about 450 mg, about 500 mg, about 550 mg, about 600 mg, about 650 mg, about 700 mg, about 750 mg, about 800 mg, about 850 mg, about 900 mg, about 950 mg, about 1,000 mg, about 2,000 mg, about 3,000 mg, about 4,000 mg, or about 5,000 mg inclusive of all values and ranges therebetween.

[0309] In some aspects, a suitable dosage of the pharmaceutical composition (e.g., comprising a bacterial mixture) is in a range of about 0.01 mg/kg to about 100 mg/kg of body weight of the subject, for example, about 0.01 mg/kg, about 0.02 mg/kg, about 0.03 mg/kg, about 0.04 mg/kg, about 0.05 mg/kg, about 0.06 mg/kg, about 0.07 mg/kg, about 0.08 mg/kg, about 0.09 mg/kg, about 0.1 mg/kg, about 0.2 mg/kg, about 0.3 mg/kg, about 0.4 mg/kg, about 0.5 mg/kg, about 0.6 mg/kg, about 0.7 mg/kg, about 0.8 mg/kg, about 0.9 mg/kg, about 1 mg/kg, about 1.1 mg/kg, about 1.2 mg/kg, about 1.3 mg/kg, about 1.4 mg/kg, about 1.5 mg/kg, about 1.6 mg/kg, about 1.7 mg/kg, about 1.8 mg/kg, 1.9 mg/kg, about 2 mg/kg, about 3 mg/kg, about 4 mg/kg, about 5 mg/kg, about 6 mg/kg, about 7 mg/kg, about 8 mg/kg, about 9 mg/kg, about 10 mg/kg body weight, about 20 mg/kg body weight, about 30 mg/kg body weight, about 40 mg/kg body weight, about 50 mg/kg body weight, about 60 mg/kg body weight, about 70 mg/kg body weight, about 80 mg/kg body weight, about 90 mg/kg body weight, or about 100 mg/kg body weight, inclusive of all values and ranges therebetween. In other aspects, a suitable dosage of the composition in a range of about 0.01 mg/kg to about 100 mg/kg of body weight, in a range of about 0.01 mg/kg to about 90 mg/kg of body weight, in a range of about 0.01 mg/kg to about 80 mg/kg of body weight, in a range of about 0.01 mg/kg to about 70 mg/kg of body weight, in a range of about 0.01 mg/kg to about 60 mg/kg of body weight, in a range of about 0.01 mg/kg to about 50 mg/kg of body weight, in a range of about 0.01 mg/kg to about 40 mg/kg of body weight, in a range of about 0.01 mg/kg to about 30 mg/kg of body weight, in a range of about 0.01 mg/kg to about 20 mg/kg of body weight, in a range of about 0.01 mg/kg to about 10 mg/kg of body weight, in a range of about 0.01 mg/kg to about 9 mg/kg of body weight, in a range of about 0.01 mg/kg to about 8 mg/kg of body weight, in a range of about 0.01 mg/kg to about 7 mg/kg of body weight, in a range of 0.01 mg/kg to about 6 mg/kg of body weight, in a range of about 0.05 mg/kg to about 5 mg/kg of body weight, in a range of about 0.05 mg/kg to about 4 mg/kg of body weight, in a range of about 0.05 mg/kg to about 3 mg/kg of body weight, in a range of about 0.05 mg/kg to about 2 mg/kg of body weight, in a range of about 0.05 mg/kg to about 1.5 mg/kg of body weight, or in a range of about 0.05 mg/kg to about 1 mg/kg of body weight.

[0310] In accordance with certain aspects, the pharmaceutical composition (e.g., comprising a bacterial mixture) can be administered, for example, more than once daily, about once per day, about every other day, about every third day, about once a week, about once every two weeks, about once every month, about once every two months, about once every three months, about once every six months, or about once every year.

[0311] In an aspect, a pharmaceutical composition can be administered to a patient in need thereof at least once daily for at least two consecutive days. In another aspect, a pharmaceutical composition is administered at least once daily for at least 3, 4, 5, 6, 7, 8, 9, 10, 11, 12, 13, 14, or 15 consecutive days. In another aspect, a pharmaceutical composition is administered at least once daily for at least 1, 2, 3, 4, 5, 6, 7, 8, 9, 10, 11, or 12 consecutive weeks. In another aspect, a pharmaceutical composition is administered at least twice, three times, four times, or five times per week for at least 1, 2, 3, 4, 5, 6, 7, 8, 9, 10, 11, or 12 consecutive weeks. In another aspect, a pharmaceutical composition is administered at least once daily for at most 4, 5, 6, 7, 8, 9, 10, 11, 12, 13, 14, 15, 16, 17, 18, 19, or 20 consecutive days or weeks. In a further aspect, a pharmaceutical composition is administered at least once daily for at most 1, 2, 3, 4, 5, 6, 7, 8, 9, 10, 11, or 12 consecutive weeks or months. In yet another aspect, a pharmaceutical composition is administered at least once for at least 1, 2, 3, 4, 5, 6, 7, 8, 9, 10, 11, or 12 consecutive months or years, chronically for a subject's entire life span, or an indefinite period of time.

[0312] In an aspect, a pharmaceutical composition can be administered to a patient in need thereof at least twice daily for at least two consecutive days. In an aspect, a pharmaceutical composition is administered at least twice daily for at least 3, 4, 5, 6, 7, 8, 9, 10, 11, 12, 13, 14, or 15 consecutive days. In another aspect, a pharmaceutical composition is administered at least twice daily for at least 1, 2, 3, 4, 5, 6, 7, 8, 9, 10, 11, or 12 consecutive weeks. In another aspect, a pharmaceutical composition is administered at least twice daily for at most 4, 5, 6, 7, 8, 9, 10, 11, 12, 13, 14, 15, 16, 17, 18, 19, or 20 consecutive days or week. In another aspect, a pharmaceutical composition is administered at least twice daily for at most 1, 2, 3, 4, 5, 6, 7, 8, 9, 10, 11, or 12 consecutive weeks or months. In another aspect, a pharmaceutical composition is administered at least twice for at least 1, 2, 3, 4, 5, 6, 7, 8, 9, 10, 11, or 12 consecutive months or years, chronically for a subject's entire life span, or an indefinite period of time.

[0313] In an aspect of the present disclosure, a pharmaceutical composition can be administered to a patient in need thereof at least three times daily for at least two consecutive days. In an aspect, a pharmaceutical composition is administered at least three times daily for at least 3, 4, 5, 6, 7, 8, 9, 10, 11, 12, 13, 14, or 15 consecutive days. In an aspect, a pharmaceutical composition is administered at least three times daily for at least 1, 2, 3, 4, 5, 6, 7, 8, 9, 10, 11, or 12 consecutive weeks. In an aspect, a pharmaceutical composition is administered at least three times daily for at most 4, 5, 6, 7, 8, 9, 10, 11, 12, 13, 14, 15, 16, 17, 18, 19, or 20 consecutive days or weeks. In an aspect, a pharmaceutical composition is administered at least three times daily for at most 1, 2, 3, 4, 5, 6, 7, 8, 9, 10, 11, or 12 consecutive weeks or months. In an aspect, a pharmaceutical composition is administered at least three times for at least 1, 2, 3, 4, 5, 6, 7, 8, 9, 10, 11, or 12 consecutive months or years, chronically for a subject's entire life span, or an indefinite period of time.

[0314] In an aspect, a pharmaceutical composition can be administered to a patient in need thereof at a dosing schedule of at least once or twice daily for at least three consecutive days or weeks. In an aspect, a dose is administered at least once, twice, or three times daily for a period between 1 and 12 weeks, between 2 and 12 weeks, between 3 and 12 weeks, between 4 and 12 weeks, between 5 and 12 weeks, between 6 and 12 weeks, between 7 and 12 weeks, between 8 and 12 weeks, between 9 and 12 weeks, between 10 and 12 weeks, between 1 and 2 weeks, between 2 and 3 weeks, between 3 and 4 weeks, between 4 and 5 weeks, between 5 and 6 weeks, between 6 and 7 weeks, between 7 and 8 weeks, between 8 and 9 weeks, between 9 and 10 weeks, or between 10 and 11 weeks.

[0315] In an aspect, a pharmaceutical composition can be administered to a patient in need thereof at a dosing schedule of once-a-week, twice-a-week, or thrice-a-week. The term “once-a-week” means that a dose is administered typically only once in a week, for example, on the same day of each week. “Twice-a-week” means that a dose is administered typically only two times in a week, for example, on the same two days of each weekly period. “Thrice-a-week” means that a dose is administered typically only three times in a week, for example, on the same three days of each weekly period.

[0316] In an aspect, a pharmaceutical composition can be administered to a patient in need thereof, wherein the administration comprises a first dosing schedule followed by a second dosing schedule. In an aspect, a first dosing schedule comprises a treatment or induction dose. In an aspect, a second dosing schedule comprises a maintenance dose. For example, a pharmaceutically active maintenance dose of a second dosage schedule can be lower than or equal to a pharmaceutically active induction dose of a first dosing schedule. In other examples, a maintenance dose of a second dosing schedule can be higher than an induction dose of a first dosing schedule.

[0317] At least one of a first and second dosing schedule for administering a pharmaceutical composition can comprise administration of the composition at least once daily for at least one day. In an aspect, at least one of a first or second dosing schedule comprises administration of the composition at least once daily for at least 2, 3, 4, 5, 6, 7, 8, 9, 10, 11, 12, 13, 14, or 15 consecutive days. In an aspect, at least one of a first or second dosing schedule comprises administration of the composition at least once daily for at least 1, 2, 3, 4, 5, 6, 7, 8, 9, 10, 11, or 12 consecutive weeks. In an aspect, at least one of a first or second dosing schedule comprises administration of the composition for at most 4, 5, 6, 7, 8, 9, 10, 11, 12, 13, 14, 15, 16, 17, 18, 19, or 20 consecutive days or weeks. In an aspect, at least one of a first or second dosing schedule comprises administration of the composition for at most 1, 2, 3, 4, 5, 6, 7, 8, 9, 10, 11, or 12 consecutive weeks or months. In an aspect, at least one of a first or second dosing schedule comprises administration of the composition for at least 1, 2, 3, 4, 5, 6, 7, 8, 9, 10, 11, or 12 consecutive months or years, chronically for a subject's entire life span, or an indefinite period of time.

[0318] In an aspect, at least one of a first or second dosing schedule used in a method can be once-a-week, twice-a-week, or thrice-a-week.

[0319] In an aspect, at least one of a first and second dosing schedule can last for at least about 2, 4, 6, 8, 10, 12, 18, 24, 36, 48, 72, or 96 months. In an aspect, a second dosing schedule lasts permanently, for a treated subject's entire life span, or an indefinite period of time. In an aspect, at least one of a first and second dosing schedule is a continuous dosing schedule. In an aspect, at least one of a first and second dosing schedule is an intermittent dosing schedule. In an aspect, at least one of a first and second dosing schedule is an intermittent dosing schedule comprising a treatment period of at least 1, 2, 3, 4, 5, 6, 7, 8, 9, 10, 11, 12, 13, or 14 days followed by a resting period of at least 1, 2, 3, 4, 5, 6, 7, 8, 9, 10, 11, 12, 13, or 14 days. In an aspect, at least one of a first and second dosing schedule comprises administering a dose every other day, every two days, or every 3, 4, 5, 6, 7, 8 days. In an aspect, a dose is administered for an extended period of time with or without titration (or otherwise changing the dosage or dosing schedule).

[0320] In an aspect, the interval between a first and a second dosing schedule is at least about 1, 2, 3, 4, 5, 6, or 7 days, or at least about 1, 2, 3, 4, 5, 6, 7, 8, 9, 10, 11, or 12 weeks, or at least about 1, 2, 3, 4, 6, 7, 8, 9, 10, 11, or 12 months.

[0321] In an aspect, a second dosing schedule (e.g., a maintenance dose) comprises a dosage about 2, 3, 4, 5, 6, 7, 8, 9, 10, 20, 30, 40, 50, 75, 100, 200, 400, 800, 1000, 5000 or more fold lower than the dosage used in a first dosing schedule (e.g., an initial induction dose). In another aspect, a second dosing schedule (e.g., a maintenance dosing schedule) has an equal or lower dosing frequency than a first dosing schedule (e.g., an initial treatment dosing schedule). In an aspect, a second dosing schedule (e.g., a maintenance dosing schedule) has a higher dosing interval than a first dosing schedule (e.g., an initial treatment dosing schedule).

[0322] In various aspects, methods described herein are useful in treatment of a human subject. In some aspects, the human is a pediatric human. In other aspects, the human is an adult human. In other aspects, the human is a geriatric human. In other aspects, the human may be referred to as a patient or subject. In some aspects, the human is a female. In some aspects, the human is a male.

[0323] In certain aspects, the human has an age in a range of from about 1 to about 18 months old, from about 18 to about 36 months old, from about 1 to about 5 years old, from about 5 to about 10 years old, from about 10 to about 15 years old, from about 15 to about 20 years old, from about 20 to about 25 years old, from about 25 to about 30 years old, from about 30 to about 35 years old, from about 35 to about 40 years old, from about 40 to about 45 years old, from about 45 to about 50 years old, from about 50 to about 55 years old, from about 55 to about 60 years old, from about 60 to about 65 years old, from about 65 to about 70 years old, from about 70 to about 75 years old, from about 75 to about 80 years old, from about 80 to about 85 years old, from about 85 to about 90 years old, from about 90 to about 95 years old or from about 95 to about 100 years old.

[0324] In one aspect, a subject being treated is a human patient. In one aspect, a patient is a male patient. In one aspect, a patient is a female patient. In one aspect, a patient is a premature newborn. In one aspect, a patient is a term newborn. In one aspect, a patient is a neonate. In one aspect, a patient is an infant. In one aspect, a patient is a toddler. In one aspect, a patient is a young child. In one aspect, a patient is a child. In one aspect, a patient is an adolescent. In one aspect, a patient is a pediatric patient. In one aspect, a patient is a geriatric patient. In one aspect, a human patient is a child patient below about 18, 15, 12, 10, 8, 6, 4, 3, 2, or 1-year-old. In another aspect, a human patient is an adult patient. In another aspect, a human patient is an elderly patient. In a further aspect, a human patient is a patient above about 30, 35, 40, 45, 50, 55, 60, 65, 70, 75, 80, 85, 90, or 95 years old. In another aspect, a patient is about between 1 and 5, between 2 and 10, between 3 and 18, between 21 and 50, between 21 and 40, between 21 and 30, between 50 and 90, between 60 and 90, between 70 and 90, between 60 and 80, or between 65 and 75 years old. In one aspect, a patient is a young old patient (65-74 years). In one aspect, a patient is a middle old patient (75-84 years). In one aspect, a patient is an old patient (>85 years).

### Additional Therapeutic Agents and Co-Formulation

[0325] The pharmaceutical compositions described herein can include one or more therapeutic agents in addition to a bacterial mixture, which can be administered to a subject in need thereof in a method described herein. The additional therapeutic agent can be administered simultaneous or sequential with a bacterial mixture (e.g., comprising one or more bacterial isolates and/or a consortium of fecal bacteria) described herein. Further, the present compositions and formulations can comprise the additional therapeutic agent (e.g. via co-formulation). For example, the additional therapeutic agent, one or more bacterial isolates, and consortium of fecal bacteria can be combined into a single formulation.

[0326] In an aspect, the additional therapeutic agent and bacterial mixture are administered to a subject simultaneously. The term “simultaneously” as used herein, means that the additional therapeutic agent and the bacterial mixture are administered with a time separation of no more than about 60 minutes, such as no more than about 30 minutes, no more than about 20 minutes, no more than about 10 minutes, no more than about 5 minutes, or no more than about 1 minute. Administration of the additional therapeutic agent and the bacterial mixture can be by simultaneous administration of a single formulation (e.g., a formulation comprising the additional therapeutic agent and a bacterial mixture) or of separate formulations (e.g., a first formulation including the additional therapeutic agent and a second formulation including the bacterial mixture).

[0327] Co-administration does not require an additional therapeutic agent to be administered simultaneously, if the timing of its administration is such that the pharmacological activities of the additional therapeutic agent and the bacterial mixture (e.g., comprising one or more bacterial isolates and/or a consortium of fecal bacteria) overlap in time. For example, the additional therapeutic agent and the bacterial mixture can be administered sequentially. The term “sequentially” as used herein means that the additional therapeutic agent and the bacterial mixture are administered with a time separation of more than about 60 minutes. For example, the time between the sequential administration of the additional therapeutic agent and the bacterial mixture can be more than about 60 minutes, more than about 2 hours, more than about 5 hours, more than about 10 hours, more than about 1 day, more than about 2 days, more than about 3 days, or more than about 1 week apart. The optimal administration times will depend on the rates of metabolism, excretion, and/or the pharmacodynamic activity of the additional therapeutic agent and the bacterial mixture being administered. Either of the additional therapeutic agent or the bacterial mixture can be administered first.

[0328] In a further aspect, the additional therapeutic agent and the bacterial mixture can be administered to a subject simultaneously but the release of additional therapeutic agent and the bacterial mixture from their respective dosage forms (or single unit dosage form if co-formulated) in the GI tract can occur sequentially.

[0329] Co-administration also does not require multiple additional therapeutic agents to be administered to the subject by the same route of administration as a bacterial mixture. Rather, each additional therapeutic agent can be administered by any appropriate route, for example, parenterally or non-parenterally.

[0330] In some aspects, the additional therapeutic agent is an agent used to treat or prevent one or more symptoms of a disorder described herein (e.g., a disorder associated with a gut dysbiosis that can be treated or prevented by administration of at least one bile acid transforming bacteria). In some aspects, the additional therapeutic agent is selected from the group consisting of isperidone, fluoxetine, aripiprazole, vitamin D, levocarnitine, and a combination thereof.

[0331] In some aspects, the additional therapeutic agent is an anti-inflammatory agent such as steroidal anti-inflammatory agents or non-steroidal anti-inflammatory agents (NSAIDS). Steroids, particularly the adrenal corticosteroids and their synthetic analogues, are well known in the art. Non-limiting examples of corticosteroids that can be administered to a subject as an additional therapeutic agent include hydroxyltriamcinolone, alpha-methyl dexamethasone, beta-methyl betamethasone, beclomethasone dipropionate, betamethasone benzoate, betamethasone dipropionate, betamethasone valerate, clobetasol valerate, desonide, desoxymethasone, dexamethasone, diflorasone diacetate, diflucortolone valerate, fluadrenolone, fluclorolone acetonide, flumethasone pivalate, fluosinolone acetonide, fluocinonide, flucortine butylester, fluocortolone, fluprednidene (fluprednylidene) acetate, flurandrenolone, halcinonide, hydrocortisone acetate, hydrocortisone butyrate, methylprednisolone, triamcinolone acetonide, cortisone, cortodoxone, flucetonide, fludrocortisone, difluorosone diacetate, fluradrenolone acetonide, medrysone, amcinafel, amcinafide, betamethasone and the balance of its esters, chloroprednisone, clocortelone, clescinolone, dichlorisone, difluprednate, flucloronide, flunisolide, fluoromethalone, fluperolone, fluprednisolone, hydrocortisone, meprednisone, paramethasone, prednisolone, prednisone, beclomethasone dipropionate. (NSAIDS) that can be used, include but are not limited to, salicylic acid, acetyl salicylic acid, methyl salicylate, glycol salicylate, salicylmides, benzyl-2,5-diacetoxybenzoic acid, ibuprofen, fulindac, naproxen, ketoprofen, etofenamate, phenylbutazone, indomethacin, and a combination thereof. Additional anti-inflammatory agents are described, for example, in U.S. Pat. No. 4,537,776, the entire contents of which is incorporated by reference herein.

[0332] In some aspects, an additional therapeutic agent that can be incorporated into a pharmaceutical composition is a prebiotic. A prebiotic is a compound or compounds (e.g. comprising one or more nutrients) administered to a subject to promote the growth, proliferation, or activity of one or more microorganisms (e.g., bacteria) in the intestine of the subject (e.g., by providing a substrate to be metabolized by the one or more microorganisms). Without wishing to be bound by theory, prebiotics can be added to a pharmaceutical composition to nutritionally supplement bacteria in the endogenous microbiome of the subject and/or in the pharmaceutical composition itself, e.g., to stimulate the growth or activity of one or more species of a consortium of fecal bacteria and/or one or more bacterial isolates. Additionally, one or more prebiotics can be added to a composition to buffer against “shock” to bacteria cells when transitioning those cells to a new environment, for example, subsequent to the isolation, purification and/or culturing or fermentation of consortium of fecal bacteria, or before or after freezing, freeze-drying, spray-drying, reconstitution in solution and the like.

[0333] Non-limiting examples of prebiotics that can be added to a pharmaceutical composition include an amino acid (e.g., valine, leucine, isoleucine), lactic acid, ammonium nitrate, amylose, barley mulch, biotin, carbonate, cellulose, chitin, choline, fructooligosaccharides (FOSs), fructose, glucose, glycerol, heteropolysaccharide, histidine, homopolysaccharide, hydroxyapatite, inulin, isomaltulose, lactose, lactulose, maltodextrins, maltose, nitrogen, oligodextrose, oligofructose, oligofructose-enriched inulin, an oligosaccharide (e.g. comprising a galactooligosaccharide (GOS), trans-galactooligosaccharide, fructooligosaccharide (FOS), xylooligosaccharides (XOS), mannooligosaccharide, or chitooligosaccharide), pectin, phosphate salts, phosphorus, polydextroses, polyols, potash, potassium, sodium nitrate, starch, sucrose, sulfur, sun fiber, tagatose, thiamine, trehalose, vitamins, a water-soluble carbohydrate, a fermentable polysaccharide, a dietary fiber, resistant starch, barley, white navy bean powder, and a combination thereof. Illustrative prebiotics include complex carbohydrates, amino acids, peptides, or other essential nutritional components for the survival of the bacterial composition.

[0334] In an aspect, a subject is not pretreated with a prebiotic prior to treatment with a pharmaceutical composition. In another aspect, the pharmaceutical composition is not supplemented with a prebiotic.

[0335] In an aspect, a prebiotic can be included (e.g., in dry or liquid forms) in a pharmaceutical composition described herein, for example, comprising a bacterial mixture.

[0336] Alternately, or additionally, a prebiotic to be administered to a subject can be included (e.g., in dry or liquid forms) in a distinct pharmaceutical composition lacking a bacterial mixture.

[0337] A prebiotic can be administered to a subject before, contemporaneously with, and/or after administration of a pharmaceutical composition comprising a bacterial mixture, either in the same pharmaceutical composition or in a separate pharmaceutical composition.

[0338] A prebiotic can be provided and administered in a single dose or in multiple doses. When provided as a single dose, a single composition can comprise only one prebiotic or a mixture of prebiotics. When provided in multiple doses, each composition dosed to the subject can comprise a single prebiotic or a mixture of prebiotics, and/or a first composition dosed to the subject can comprise a different prebiotic or prebiotics than a second composition dosed to the subject.

[0339] As examples, when multiple doses are provided, a first composition comprising a prebiotic can include a first prebiotic, e.g., inulin, and a second composition can include a different prebiotic, e.g., fructooligosaccharide, with or without the first prebiotic. Alternately, a first composition can include a combination of prebiotics, e.g., inulin and fructooligosaccharide and a second composition can include a different combination of prebiotics, e.g., inulin and white navy bean powder. A first composition can include a combination of prebiotics and a second composition can include only one prebiotic.

[0340] The amount of prebiotic included in a composition depends on the specific prebiotic, the specific bacterial species targeted by the prebiotic, and/or the disease state of the subject/patient.

[0341] In some aspects, an additional therapeutic agent be incorporated into a pharmaceutical composition is an antidiarrheal agent. Non-limiting examples of antidiarrheal agents suitable for inclusion in a pharmaceutical composition described herein include, but are not limited to, DPP-IV inhibitors, natural opioids, such as tincture of opium, paregoric, and codeine, synthetic opioids, such as diphenoxylate, difenoxin and loperamide, bismuth subsalicylate, lanreotide, vapreotide and octreotide, motion antagonists, COX2 inhibitors like celecoxib, glutamine, thalidomide and traditional antidiarrheal remedies, such as kaolin, pectin, berberine and muscarinic agents, and a combination thereof.

[0342] In some aspects, the additional therapeutic agent incorporated into a pharmaceutical composition can be an analgesic. Analgesics useful in the compositions and methods described herein include, without limitation, morphine, codeine, heroine, methadone and related compounds, thebaine, orpiavine, and their derivatives, buprenorphine, the piperidines, morphinans, benzomorphans, tetrahydroisoquinolines, thiambutanes, benzylamines, tilidine, viminol, nefopam, capsaicin(8-methyl-N-vanillyl-6E-nonenamide), “synthetic” capsaicin(N-vanillylnonamide) and related compounds, and a combination thereof.

[0343] In some aspects, the additional therapeutic agent is an anti-bacterial agent, which includes, but is not limited to, cephalosporin antibiotics (cephalexin, cefuroxime, cefadroxil, cefazolin, cephalothin, cefaclor, cefamandole, cefoxitin, cefprozil, and ceftobiprole); fluoroquinolone antibiotics (cipro, Levaquin, floxin, tequin, avelox, and norflox); tetracycline antibiotics (tetracycline, minocycline, oxytetracycline, and doxycycline); penicillin antibiotics (amoxicillin, ampicillin, penicillin V, dicloxacillin, carbenicillin, vancomycin, and methicillin); monobactam antibiotics (aztreonam); carbapenem antibiotics (ertapenem, doripenem, imipenem/cilastatin, and meropenem); and a combination thereof. In some aspects, the anti-bacterial agent can be any of the penicillin, cephalosporin, monobactam, and carbapenem antibiotics, or a combination thereof.

[0344] In one aspect, a method further comprises pretreating a subject with an antibiotic composition prior to administering a therapeutic bacterial mixture. In one aspect, an antibiotic composition administered herein comprises an antibiotic selected from the group consisting of rifabutin, clarithromycin, clofazimine, vancomycin, rifampicin, nitroimidazole, chloramphenicol, and a combination thereof. In another aspect, an antibiotic composition administered herein comprises an antibiotic selected from the group consisting of rifaximin, rifamycin derivative, rifampicin, rifabutin, rifapentine, rifalazil, bicozamycin, aminoglycoside, gentamycin, neomycin, streptomycin, paromomycin, verdamicin, mutamicin, sisomicin, netilmicin, retymicin, kanamycin, aztreonam, aztreonam macrolide, clarithromycin, dirithromycin, roxithromycin, telithromycin, azithromycin, bismuth subsalicylate, vancomycin, streptomycin, fidaxomicin, amikacin, arbekacin, neomycin, netilmicin, paromomycin, rhodostreptomycin, tobramycin, apramycin, and a combination thereof. In another aspect, a subject is not pretreated with an antibiotic composition prior to administering a bacterial mixture. In another aspect, the pharmaceutical composition is not supplemented with an antibiotic composition. In a further aspect, a method further comprises pretreating a subject with an anti-inflammatory drug prior to administration of a bacterial mixture. In yet another aspect, a subject is not pretreated with an anti-inflammatory drug prior to administering a bacterial or mixture. In another aspect, a bacterial mixture is not supplemented with an anti-inflammatory.

[0345] Delivery of an additional therapeutic agent can be targeted to various parts of the GI tract, as described herein.

### Use of Pharmaceutical Compositions

[0346] Disclosed herein are pharmaceutical compositions that can be administered to a subject to treat or prevent a condition, disorder or disease by increasing an amount of one or more bile acid transforming bacteria in the intestine of the subject, and as a result rescuing a deficiency in bile acid metabolism in the subject. In an aspect, administration of a composition described herein increases a concentration or level of a secondary bile acid in the intestine of the subject by administering bacteria in a bacterial mixture that have been selected to produce and/or secrete one or more secondary bile acids in the intestine of the subject following administration of the pharmaceutical composition. In an aspect, administration of a pharmaceutical composition comprising a bacterial mixture described herein treats or prevents a disorder by delivering one or more bile acid metabolizing bacteria to the intestine of the subject, via the engraftment in the intestine of bacteria contained within the administered bacterial mixture, and in certain embodiments the subsequent secretion of a secondary bile acid or intermediate or derivative thereof by the engrafted bacteria. Thus, the pharmaceutical compositions described herein are advantageous over compositions that administer a finite amount of a secondary bile acid alone (i.e., in the absence of a bile acid transforming bacteria), as administration of the bacterial mixtures and subsequent engraftment of the bacteria contained therein results in a continuous, sustained, long-term supply of secondary bile acids to a subject without the need for regular (e.g., daily) replenishing administrations of the applicable compound.

[0347] In aspects, a pharmaceutical composition can treat or prevent a disorder that is caused by a reduction or deficiency in a level of one or more secondary bile acids in the intestine of the subject. In such cases, administration of a composition can increase the level of the one or more secondary bile acids in the intestine to directly treat the disorder, resulting in a reduction in a severity of one or more symptoms associated with the disorder. In aspects, a pharmaceutical composition can treat or prevent a disorder that is not directly caused by a deficiency in a level of one or more secondary bile acids, but has one or more symptoms that are responsive to, or can benefit from, an increase in secondary bile acids in the intestine of the subject (e.g., the severity of one or more symptoms of the disorder is reduced as a result of an increase in one or more bile acid transforming bacteria in the intestine, even though the cause of the disorder may remain).

[0348] In various aspects, provided herein is a method of supplementing or modulating a microbiome of a subject in need thereof to provide or restore an ecological balance, comprising administering to the subject a composition described herein. For instance, in various aspects, there is provided methods of diminishing or inhibiting one or more pathogenic bacteria in the intestine of a patient by administering a composition described herein. In various aspects, administration of one or more bacterial isolates or a consortium of fecal bacteria described herein augments growth of at least one type of bacteria not detectably present in a patient's gastrointestinal (GI) tract prior to administration and, in various aspects, which is non-pathogenic.

[0349] In various aspects, provided herein is a method of restoring or enhancing ecological control over gut pathogens or pathobionts in a subject in need thereof, comprising administering to the subject a composition described herein.

[0350] In aspects, the pharmaceutical composition is for administration to a subject having a disorder related to an intestinal dysbiosis. In aspects, the disorder is selected from the group consisting of inflammatory bowel disease (IBD), irritable bowel syndrome (IBS), C. difficile infection (CDI), C. difficile-associated disease (CDAD), an antibiotic-induced adverse effect, and a combination thereof.

[0351] In various aspects, a method comprises administering a composition described herein to treat a disease or condition associated with GI dysbiosis in a subject in need thereof. In some aspects, the subject has inflammatory bowel disease (IBD), for example, Crohn's disease, colitis (e.g., ulcerative colitis or microscopic colitis), or pouchitis. IBD is a group of inflammatory conditions of the large intestine and, in some cases, the small intestine. Examples of LBD that can be treated by the compositions, formulations and methods described herein include, but are not limited to, Crohn's disease, ulcerative colitis, microscopic colitis, pouchitis, collagenous colitis, lymphocytic colitis, ischemic colitis, diversion colitis, Behçet's syndrome, infective colitis, and indeterminate colitis. In an aspect, provided herein is a method of treating ulcerative colitis comprising administering a composition described herein to a subject in need thereof. In another aspect, provided herein is a method of treating Crohn's Disease comprising administering a composition described herein to a subject in need thereof. In a further aspect, provided herein is a method of treating pouchitis comprising administering a composition described herein to a subject in need thereof.

[0352] In various aspects, a method comprises administering a composition described herein to treat ulcerative colitis (UC) in a subject in need thereof. UC is one form of IBD. It is a chronic disease of the colon, in which the lining of the colon becomes inflamed and develops tiny open sores, or ulcers, that produce pus and mucous. In some aspects, methods described herein can ameliorate, reduce, or eliminate the inflammation and/or ulceration associated with UC. In some aspects, methods described herein can ameliorate, reduce, or eliminate one or more symptoms associated with UC including but not limited to, abdominal discomfort or pain, frequent emptying of the colon, lose and urgent bowel movements, persistent diarrhea, bloody stool, loss of appetite, and weight loss. In some aspects, methods described herein can reduce or prevent the delay in growth and development in children afflicted with UC.

[0353] In various aspects, a method comprises administering a composition described herein to treat UC in a subject in need thereof. For example, a successful treatment of the subject can be measured using the indices below, e.g., the present methods cause a subject's activity score threshold to change from severe to moderate, mild, or remission; or cause a patient's score to change from moderate to mild or remission; or cause a patient's score to change from mild to remission (see Table 2).

TABLE 2

| | Parameters | Scoring | Activity score thresholds | | | |
|---|---|---|---|---|---|---|
| Index | assessed | system | Remission | Mild | Moderate | Severe |
| Mayo score | Stool frequency | Cumulative | 0-2 | 3-5 | 6-10 | 11-12 |
| | Rectal bleeding | score | | | | |
| | Physician's global | | | | | |
| | assessment | | | | | |
| | Sigmoidoscopy | | | | | |
| UCDAI | Stool frequency | Cumulative | 0-2 | 3-8 | | 9-12 |
| | Rectal bleeding | score | | | | |
| | Physician's global | | | | | |
| | assessment | | | | | |
| | Sigmoidoscopy | | | | | |
| Rachmilewitz | Bowel movement | Cumulative | 0-4 | 5-10 | 11-17 | >17 |
| score (CAI) | frequency | score | | | | |
| | Blood in stools | | | | | |
| | Physician's global | | | | | |
| | assessment | | | | | |
| | Abdominal | | | | | |
| | pain/cramps | | | | | |
| | Temperature | | | | | |
| | EIMs | | | | | |
| | Laboratory findings | | | | | |
| | (ESR, hemoglobin) | | | | | |
| Powell-Tuck | Well-being | Cumulative | ≤3 | 4-10 | 11-14 | >14 |
| index (St | Abdominal pain | score | | | | |
| Mark's index) | Bowel movement | | | | | |
| | frequency | | | | | |
| | Stool consistency | | | | | |
| | Bleeding | | | | | |
| | Anorexia | | | | | |
| | Nausea/vomiting | | | | | |
| | Abdominal | | | | | |
| | tenderness | | | | | |
| | Eye, joint, mouth, | | | | | |
| | or skin | | | | | |
| | complications | | | | | |
| | Temperature | | | | | |
| | Sigmoidoscopy | | | | | |
| SCCAI | Bowel movement | Cumulative | ≤2 | 3-20 | | |
| (Walmsley) | frequency (day) | score | <2.5 | | | |
| | Bowel movement | | | | | |
| | frequency (night) | | | | | |
| | Urgency of | | | | | |
| | defecation | | | | | |
| | Blood in stool | | | | | |
| | Well-being | | | | | |
| | Extracolonic | | | | | |
| | features | | | | | |
| Lichtiger index | Diarrhea frequency | Cumulative | ≤3 | 4-8 | 9-14 | >14 |
| | Nocturnal diarrhea | score | | | | |
| | Visible blood (% of | | | | | |
| | movements) | | | | | |
| | Fecal incontinence | | | | | |
| | Abdominal | | | | | |
| | pain/cramping | | | | | |
| | Well-being | | | | | |
| | Abdominal | | | | | |
| | tenderness | | | | | |
| | Need for | | | | | |
| | antidiarrheal | | | | | |
| | medications | | | | | |
| Seo index | Bowel movement | Cumulative | <108 | <150 | 150-220 | >220 |
| | frequency | score with | <120 | | | |
| | Blood in stool | components | | | | |
| | ESR | given | | | | |
| | Hemoglobin | different | | | | |
| | Albumin | weightings | | | | |
| | | (+ constant to | | | | |
| | | yield a mean | | | | |
| | | value as close | | | | |
| | | as possible to | | | | |
| | | Truelove- | | | | |
| | | Witts criteria) | | | | |

[0354] In some aspects, a method comprises administering a pharmaceutical composition described herein to treat irritable bowel syndrome (IBS) in a subject in need thereof. IBS is a common disorder that affects the colon and can cause cramping, abdominal pain, bloating, gas, diarrhea and constipation. IBS is classified based on the predominant symptom of diarrhea (IBS with predominant diarrhea, IBS-D), constipation (IBS with predominant constipation, IBS-C) or mixed symptoms (IBS with alternating constipation and diarrhea, IBS-A). Methods described herein can be effective in treating one or more of IBS-D, IBS-C, and/or IBS-A. In some aspects, methods described herein (e.g., comprising administering a composition described herein) can reduce or eliminate one or more symptoms associated with one or more of IBS-D, IBS-C, and/or IBS-A.

[0355] In aspects, a method comprises administering a pharmaceutical composition described herein to treat or prevent a disease/disorder associated with an abnormal enteric microflora (e.g. intestinal dysbiosis) in a subject in need thereof. The disease/disorder can be selected from a gastro-intestinal disorder including irritable bowel syndrome or spastic colon, Functional Bowel Disease (FBD), including constipation predominant FBD, pain predominant FBD, upper abdominal FBD, Nonulcer Dyspepsia (NUD), gastro-esophageal reflux, inflammatory bowel disease including Crohn's disease, ulcerative colitis, indeterminate colitis, collagenous colitis, microscopic colitis, chronic Clostridium difficile infection, pseudomembranous colitis, mucous colitis, antibiotic associated colitis, idiopathic or simple constipation, diverticular disease, AIDS enteropathy, small bowel bacterial overgrowth, coeliac disease, polyposis coil, colonic polyps, chronic idiopathic pseudo obstructive syndrome, and toxic megacolon.

[0356] In aspects, a method comprises administering a composition described herein to treat or prevent a disorder associated with a liver disorder in a subject in need thereof. Non-limiting examples of a liver disorder include nonalcoholic steatohepatitis (NASH), hepatic encephalopathy, hepatitis B, primary biliary cirrhosis, Primary Sclerosing Cholangitis (PSC), fatty liver, and cryptogenic cirrhosis. In aspects, such diseases/disorders are related to an intestinal dysbiosis of a subject.

[0357] In aspects, a method comprises administering a composition described herein to treat or prevent a rheumatic disorder in a subject in need thereof. Non-limiting examples of a rheumatic disorder include rheumatoid arthritis, non-rheumatoid arthritis, non-rheumatoid factor positive arthritis, ankylosing spondylitis, Lyme disease, and Reiter's syndrome. In aspects, such diseases/disorders are related to an intestinal dysbiosis of a subject.

[0358] In aspects, a method comprises administering a composition described herein to treat or prevent an immune-mediated disorder in a subject in need thereof. Non-limiting examples of an immune-mediated disorder include glomerulonephritis, hemolytic uraemic syndrome, juvenile diabetes mellitus, mixed cryoglobulinaemia, polyarteritis, familial Mediterranean fever, amyloidosis, scleroderma, systemic lupus erythematosus, and Beheets syndrome. In aspects, such diseases/disorders are related to an intestinal dysbiosis of a subject.

[0359] In aspects, a method comprises administering a composition described herein to treat or prevent an autoimmune disorder in a subject in need thereof. Non-limiting examples of an autoimmune disorder include Acute Disseminated Encephalomyelitis (ADEM), acute necrotizing hemorrhagic leukoencephalitis, Addison's disease, agammaglobulinemia, alopecia areata, amyloidosis, ankylosing spondylitis, anti-GBM/anti-TBM nephritis, Antiphospholipid Syndrome (APS), autoimmune angioedema, autoimmune aplastic anemia, autoimmune dysautonomia, autoimmune hemolytic anemia, autoimmune hepatitis, autoimmune hypedipidemia, autoimmune immunodeficiency, Autoimmune Inner Ear Disease (AIED), autoimmune myocarditis, autoimmune oophoritis, autoimmune pancreatitis, autoimmune retinopathy, Autoimmune Thrombocytopenic Purpura (ATP), autoimmune thyroid disease, autoimmune urticarial, axonal & neuronal neuropathies, Balo disease, Behcet's disease, bullous pemphigoid, cardiomyopathy, Castleman disease, celiac disease, Chagas disease, Chronic Inflammatory Demyelinating Polyneuropathy (CIDP), Chronic Recurrent Multifocal Ostomyelitis (CRMO), Churg-Strauss syndrome, cicatricial pemphigoid/benign mucosal pemphigoid, Crohn's disease, Cogan's syndrome, cold agglutinin disease, congenital heart block, Coxsackie myocarditis, CREST disease, essential mixed cryoglobulinemia, demyelinating neuropathies, dermatitis herpetiformis, dermatomyositis, Devic's disease (neuromyelitis optica), discoid lupus, Dressler's syndrome, endometriosis, eosinophilic esophagitis, eosinophilic fasciitis, erythema nodosum, experimental allergic encephalomyelitis, Evans syndrome, fibrosing alveolitis, giant cell arteritis (temporal arteritis), giant cell myocarditis, glomerulonephritis, Goodpasture's syndrome, Granulomatosis With Polyangiitis (GPA), Graves' disease, Guillain-Barre syndrome, Hashimoto's encephalitis, Hashimoto's thyroiditis, hemolytic anemia, Henoch-Schonlein purpura, herpes gestationis, hypogammaglobulinemia, idiopathic thrombocytopenic purpura (ITP), IgA nephropathy, IgG4-related sclerosing disease, immunoregulatory lipoproteins, inclusion body myositis, interstitial cystitis, juvenile arthritis, juvenile idiopathic arthritis, juvenile myositis, Kawasaki syndrome, Lambert-Eaton syndrome, leukocytoclastic vasculitis, lichen planus, lichen sclerosus, ligneous conjunctivitis, linear IgA disease (LAD), lupus (systemic lupus erythematosus), chronic Lyme disease, Meniere's disease, microscopic polyangiitis, Mixed Connective Tissue Disease (MCTD), Mooren's ulcer, Mucha-Habermann disease, multiple sclerosis, myasthenia gravis, myositis, narcolepsy, neuromyelitis optica (Devic's), neutropenia, ocular cicatricial pemphigoid, optic neuritis, palindromic rheumatism, PANDAS (Pediatric Autoimmune Neuropsychiatric Disorders Associated with Streptococcus), paraneoplastic cerebellar degeneration, Paroxysmal Nocturnal Hemoglobinuria (PNH), Parry Romberg syndrome, Parsonnage-Turner syndrome, pars planitis (peripheral uveitis), pemphigus, peripheral neuropathy, perivenous encephalomyelitis, pernicious anemia, POEMS syndrome, polyarteritis nodosa, type I, II, & III autoimmune polyglandular syndromes, polymyalgia rheumatic, polymyositis, postmyocardial infarction syndrome, postpericardiotomy syndrome, progesterone dermatitis, primary biliary cirrhosis, Primary Sclerosing Cholangitis (PSC), psoriasis, psoriatic arthritis, idiopathic pulmonary fibrosis, pyoderma gangrenosum, pure red cell aplasia, Raynaud's phenomenon, reactive arthritis, reflex sympathetic dystrophy, Reiter's syndrome, relapsing polychondritis, restless legs syndrome, retroperitoneal fibrosis, rheumatic fever, rheumatoid arthritis, sarcoidosis, Schmidt syndrome, scleritis, scleroderma, Sjögren's syndrome, sperm & testicular autoimmunity, stiff person syndrome, Subacute Bacterial Endocarditis (SBE), Susac's syndrome, sympathetic ophthalmia, Takayasu's arteritis, temporal arteritis/giant cell arteritis, Thrombocytopenic Purpura (TTP), Tolosa-Hunt syndrome, transverse myelitis, type 1 diabetes, asthma, ulcerative colitis, Undifferentiated Connective Tissue Disease (UCTD), uveitis, vasculitis, vesiculobullous dermatosis, vitiligo, and Wegener's granulomatosis. In aspects, such disorders are related to an intestinal dysbiosis of a subject.

[0360] In aspects, a method comprises administering a composition described herein to treat or prevent a neurological syndrome in a subject in need thereof. Non-limiting examples of a neurological syndrome include as chronic fatigue syndrome, migraine, multiple sclerosis, amyotrophic lateral sclerosis, myasthenia gravis, Gillain-Barré syndrome, Parkinson's disease, Alzheimer's disease, Chronic Inflammatory Demyelinating Polyneuropathy, and other degenerative disorders. In aspects, such syndromes are related to an intestinal dysbiosis of a subject.

[0361] In aspects, a method comprises administering a composition described herein to treat or prevent a psychiatric or mental disorder in a subject in need thereof. Non-limiting examples of a psychiatric or mental disorder include chronic depression, schizophrenia, psychotic disorders, manic depressive illness; regressive disorders including, Asperger's syndrome, Rett syndrome, Attention Deficit Hyperactivity Disorder (ADHD), Attention Deficit Disorder (ADD), the regressive disorder, autism, Sudden Infant Death Syndrome (SIDS), and anorexia nervosa. In aspects, such diseases/disorders are related to an intestinal dysbiosis of a subject.

[0362] In aspects, a method comprises administering a composition described herein to treat or prevent a dermatological condition in a subject in need thereof. Non-limiting examples of a dermatological condition include chronic urticaria, acne, eczema, atopic dermatitis, contact dermatitis, dermatitis herpetiformis and vasculitis disorders. In aspects, such diseases/disorders are related to an intestinal dysbiosis of a subject.

[0363] In aspects, a method comprises administering a composition described herein to treat or prevent a cardiovascular and/or vascular disorder in a subject in need thereof. In aspects, such diseases/disorders are related to an intestinal dysbiosis of a subject.

[0364] In aspects, a method comprises administering a composition described herein to treat or prevent a bloodstream infection (BSI) in a subject in need thereof. Patients at risk for such BSIs include but are not limited to solid organ transplant patients; chronic kidney disease patients, e.g., on hemodialysis; and oncology patients. In aspects, such BSIs are related to an intestinal dysbiosis of a subject.

[0365] In aspects, a method comprises administering a composition described herein to treat or prevent a catheter or intravascular-line infection (e.g., central-line infection) in a subject in need thereof. In aspects, such infections are related to an intestinal dysbiosis of a subject.

[0366] In aspects, a method comprises administering a composition described herein to treat or prevent a skin or soft tissue infection in a subject in need thereof. In aspects, such infections are related to an intestinal dysbiosis of a subject.

[0367] In aspects, a method comprises administering a composition described herein to treat or prevent a surgical-site infection in a subject in need thereof. In aspects, such infections are related to an intestinal dysbiosis of a subject.

[0368] In aspects, a method comprises administering a composition described herein to treat or prevent a urinary tract infection (e.g., antibiotic-resistant urinary tract infections and catheter-associated urinary tract infections) in a subject in need thereof. In aspects, such infections are related to an intestinal dysbiosis of a subject.

[0369] In aspects, a method comprises administering a composition described herein to treat or prevent a wound infection in a subject in need thereof. In aspects, such infections are related to an intestinal dysbiosis of a subject.

[0370] In aspects, a method comprises administering a composition described herein to treat or prevent an infection in a subject in need thereof. Non-limiting examples of an infection include an antibiotic-resistant infection and an antibiotic-sensitive infection. In aspects, such infections are related to an intestinal dysbiosis of a subject.

[0371] In aspects, the pharmaceutical compositions and methods described herein can treat or prevent meningitis. In aspects, the meningitis is related to an intestinal dysbiosis of a subject.

[0372] In aspects, a method comprises administering a composition described herein to treat or prevent pneumonia, e.g., ventilator-associated pneumonia in a subject in need thereof. In aspects, the pneumonia is related to an intestinal dysbiosis of a subject.

[0373] In aspects, the compositions, formulations and methods described herein can be used in patient populations who are in an outpatient setting, hospitalized, and/or in long-term care facilities. Such patient populations are at risk for nosocomial infections. In aspects, such infections are related to an intestinal dysbiosis of a subject.

[0374] In aspects, a method comprises administering a composition described herein to treat or prevent Primary Sclerosing Cholangitis (PSC) in a subject in need thereof. For example, one or more bacterial isolates provided in a pharmaceutical composition administered to the subject can replace a dysbiotic gut microbiome with a healthy community, thereby, at least, reducing bile duct inflammation and/or improving liver function.

[0375] In aspects, a method comprises administering a composition described herein to treat or prevent a diarrheal disease in a subject in need thereof. Non-limiting examples of a diarrheal disease include acute bloody diarrhea (e.g., dysentery), acute watery diarrhea (e.g., cholera), checkpoint inhibitor associated colitis, diarrhea due to food poisoning, persistent diarrhea, and traveler's diarrhea. In aspects, the diarrhea is related to an intestinal dysbiosis of a subject.

[0376] In various aspects, administration of a pharmaceutical composition described herein can reduce, ameliorate, or eliminate one or more symptom(s) associated with a herein-described condition, disease, or disorder. Exemplary symptoms include, but are not limited to, diarrhea, bloody stool, mouth sores, perianal disease, abdominal pain, abdominal cramping, fever, fatigue, weight loss, iron deficiency, anemia, appetite loss, weight loss, anorexia, delayed growth, delayed pubertal development, and inflammation of the skin, eyes, joints, liver, and bile ducts. In aspects, the symptom is related to an intestinal dysbiosis of a subject.

[0377] In some aspects, a method comprises administering a composition described herein to treat or prevent an infection by pathogenic bacteria and/or inhibit the growth or decrease the number of pathogenic bacteria in the GI tract of a subject in need thereof. In an aspect, the pathogenic bacteria is enterobacteria such as Salmonella. In various aspects, a method comprises administering a composition described herein to mitigate or prevent the overgrowth of various coliforms in a patient's gut (including coliforms that are virulent and/or antibiotic resistant). Illustrative coliforms include Citrobacter, Enterobacter, Hafnia, Kelbsiella, and Escherichia. In some aspects, the methods and compositions described herein prevent or diminish secondary infections with resistant organisms.

[0378] In still other aspects, a method comprises administering a composition described herein to treat or prevent an infectious disease of the intestines in a subject in need thereof. Non-limiting examples of an infectious disease of the intestine include CDI and/or a CDAD, nosocomial infection, secondary emergent infection, amebiasis, intestinal tuberculosis, or parasitic disorder. In some aspects, provided herein are methods for treating or preventing a CDI and/or a CDAD, comprising administering an effective amount of a pharmaceutical composition described herein to a subject or a patient need thereof. In various aspects, the CDI or CDAD comprises one or more of: C. difficile diarrhea (CDD), C. difficile intestinal inflammatory disease, colitis, pseudomembranous colitis, fever, abdominal pain, dehydration and disturbances in electrolytes, megacolon, peritonitis, and perforation and/or rupture of the colon.

[0379] In various aspects, a composition described herein is administered to a subject in need thereof to treat or prevent a disease or condition associated with GI dysbiosis in the context of initial onset or relapse/recurrence (e.g. due to continued or restarted antibiotic therapy). For example, in a subject that has previously suffered from a GI dysbiosis, the present pharmaceutical composition or formulation can be administered upon the first symptoms of recurrence in the subject. By way of non-limiting example, symptoms of recurrence include, in a mild case, about 5 to about 10 watery bowel movements per day, no significant fever, and only mild abdominal cramps while blood tests can show a mild rise in the white blood cell count up to about 15,000 (normal levels are up to about 10,000), and, in a severe case, more than about 12 watery stools per day, nausea, vomiting, high fever (e.g. about 102-104° F.), rectal bleeding, severe abdominal pain (e.g. with tenderness), abdominal distention, and a high white blood count (e.g. of about 15,000 to about 40,000).

[0380] In some aspects, the methods described herein can be used to treat a subject or patient who is suffering from, or is susceptible to, a disease or condition associated with GI dysbiosis. For example, the subject can be undergoing or have undergone an initial and/or adjunctive therapy that renders the subject susceptible to a disease or condition associated with GI dysbiosis. In some aspects, the subject is undergoing treatment, or has undergone treatment, with an antibiotic. For example, the subject can have taken an antibiotic during the past about 30 days and/or have an immune system that is weak (e.g. from a chronic illness). In another example, the patient can have recently been in the hospital, including in an intensive care unit. Accordingly, in some aspects, a method comprises administering a composition described herein to treat or prevent a nosocomial infection and/or a secondary emergent infection and/or a hospital acquired infection (HAI) in a subject in need thereof.

[0381] In various aspects, described herein are methods for treating antibiotic-induced adverse effects in the GI tract, comprising administering an effective amount of a microbial therapeutic (e.g., one or more bacterial isolates) to a subject in need thereof. In another aspect, provided herein are methods for preventing an antibiotic-induced adverse effect in the GI tract, comprising administering an effective amount of a microbial therapeutic to a subject in need thereof.

[0382] In another aspect, a pharmaceutical composition or a plurality of pharmaceutical compositions, as disclosed herein, can be used in the manufacture of a medicament, e.g., for treating a herein-described condition, disease, or disorder in a subject in need thereof. In various aspects, the bacterial isolates as described herein protect the intestinal microbiome from antibiotics-induced damage. In some aspects, the methods described herein can treat or prevent an antibiotics-associated adverse effect including but not limited to diarrhea, nausea, vomiting, dysgeusia, colitis, and pseudomembranous colitis disease and/or symptoms. In an aspect, methods described herein can be used to treat or prevent antibiotic-associated diarrhea (AAD).

[0383] Provided herein is a method of delivering one or more bile acid transforming bacteria to the intestine of a subject in need thereof, the method comprising administering to the subject a pharmaceutical composition comprising a bacterial mixture comprising one or more bile acid transforming bacteria, such that the one or more bile acid transforming bacteria engraft in the intestine of the subject and release a secondary bile acid or intermediate or derivative thereof into the subject's intestine. In an aspect, a secondary bile acid or intermediate or derivative thereof is taken up or absorbed by a cell of the host (e.g., a cell of the intestinal lining) where it used or metabolized by the host to alleviate a symptom of a disorder disclosed herein.

[0384] Provided herein is a method of delivering one or more bile acid transforming bacteria to the intestine of a subject in need thereof, the method comprising administering to the subject a bacterial mixture comprising a bacterial isolate and/or a consortium of fecal bacteria selected to produce one or more secondary bile acids, such that the bile acid transforming bacteria of the bacterial mixture engraft in the intestine of the subject and release the secondary bile acid or derivative or intermediate thereof into the subject's intestine. In an aspect, a relative abundance of one or more bile acid transforming bacteria in the intestine of the subject following administration of the pharmaceutical composition is greater than the relative abundance of the one or more bile acid transforming bacteria in the intestine of the subject prior to administration of the composition.

[0385] Provided herein is a method of delivering one or more bile acid transforming bacteria to the intestine of a subject in need thereof, the method comprising determining or diagnosing a level of a secondary bile acid produced by intestinal bacteria of the subject and administering to the subject a pharmaceutical composition based on the level of the secondary bile acid. In an aspect, the pharmaceutical composition is administered if the level of the secondary bile acid produced by the intestinal bacteria is below a threshold level.

[0386] In an aspect, a presence or level of secondary bile acid produced by the intestinal bacteria of the subject is determined directly from stool of the subject (e.g., in a direct secondary bile acid quantification assay using for example gas chromatography). In an aspect, a presence or level of secondary bile acid produced by the intestinal bacteria of the subject is determined using a TGR5 reporter cell assay as provided in the present disclosure. In another aspect, a presence or level of secondary bile acid produced by the intestinal bacteria of the subject is determined in a functional assay after extracting or harvesting the intestinal bacteria from stool of the subject (e.g., in an “ex vivo” assay that directly determines the capability of intestinal bacteria to produce one or more secondary bile acids). In another aspect, the functional assay includes a TGR5 reporter cell assay as provided in the present disclosure. In one aspect, the TGR5 reporter cell assay correlates the ability of an input substrate to activate the TGR5 receptor with a presence or level of secondary bile acid produced by the intestinal bacteria of the subject. In one aspect, the TGR5 reporter cell assay correlates the ability of an input substrate to activate the TGR5 receptor with a presence or level of bile acid transforming bacteria in the intestines of the subject. For example, fecal bacteria can be extracted from stool of a subject (e.g., by filtering and/or centrifuging), incubated for a period of time (e.g., at least 1 at least 2, at least 3, at least 4, at least 5, at least 6, at least 7, at least 8, at least 9, at least 10, at least 11, at least 12, at least 13, at least 14, at least 15, at least 16, at least 17, at least 18, at least 19, at least 20, at least 21, at least 22, at least 23, at least 24 hours, or greater than 24 hours) with one or more primary bile acid or secondary bile acid substrates (e.g., one or more of the primary bile acids cholic acid or chenodeoxycholic acid or one or more of the secondary bile acids deoxycholic acid, isodeoxycholic acid, glycodeoxycholic acid, taurodeoxycholic acid, glycolithocholic acid, taurolithocholic acid, lithocholic acid, ursodeoxycholic acid, isoursodeoxycholic acid, glycoursodeoxycholic acid or tauroursodeoxycholic acid), and a rate of transformation of the bile acid substrate determined (e.g., by measuring directly or indirectly the reduction in the level of substrate or the amount of secondary bile acid produced).

[0387] In an aspect, a presence or level of secondary bile acid produced by the intestinal bacteria of a donor is determined directly from stool of the donor (e.g., in a direct secondary bile acid quantification assay using for example gas chromatography). In an aspect, a presence or level of secondary bile acid produced by the intestinal bacteria of the donor is determined using a TGR5 reporter cell assay as provided in the present disclosure. In another aspect, a presence or level of secondary bile acid produced by the intestinal bacteria of the donor is determined in a functional assay after extracting or harvesting the intestinal bacteria from stool of the donor (e.g., in an “ex vivo” assay that directly determines the capability of intestinal bacteria to produce one or more secondary bile acids). In another aspect, the functional assay includes a TGR5 reporter cell assay as provided in the present disclosure. In one aspect, the TGR5 reporter cell assay correlates the ability of an input substrate to activate the TGR5 receptor with a presence or level of secondary bile acid produced by the intestinal bacteria of the donor. In one aspect, the TGR5 reporter cell assay correlates the ability of an input substrate to activate the TGR5 receptor with a presence or level of bile acid transforming bacteria in the intestines of the donor. For example, fecal bacteria can be extracted from stool of a donor (e.g., by filtering and/or centrifuging), incubated for a period of time (e.g., at least 1 at least 2, at least 3, at least 4, at least 5, at least 6, at least 7, at least 8, at least 9, at least 10, at least 11, at least 12, at least 13, at least 14, at least 15, at least 16, at least 17, at least 18, at least 19, at least 20, at least 21, at least 22, at least 23, at least 24 hours, or greater than 24 hours) with one or more primary bile acid or secondary bile acid substrates (e.g., one or more of the primary bile acids cholic acid or chenodeoxycholic acid or one or more of the secondary bile acids deoxycholic acid, isodeoxycholic acid, glycodeoxycholic acid, taurodeoxycholic acid, glycolithocholic acid, taurolithocholic acid, lithocholic acid, ursodeoxycholic acid, isoursodeoxycholic acid, glycoursodeoxycholic acid or tauroursodeoxycholic acid), and a rate or level of transformation of the bile acid substrate determined (e.g., by measuring directly or indirectly the reduction in the level of substrate or the amount of secondary bile acid produced).

[0388] In an aspect the at least one secondary bile acid is deoxycholic acid (DCA), and a subject is selected for treatment based on a level of DCA that is lower than a threshold value, for example in a stool of the subject or arising from a bile acid transforming functional assay incorporating fecal bacteria of the subject and a bile acid substrate, e.g., cholic acid. In an aspect, the at least one secondary bile acid is glycodeoxycholic acid (GDCA), and a subject is selected for treatment based on a level of GDCA that is lower than a threshold value, for example in a stool of the subject or arising from a bile acid transforming functional assay incorporating fecal bacteria of the subject and a bile acid substrate, e.g., DCA). In another aspect, the at least one secondary bile acid is taurodeoxycholic acid (TDCA), and a subject is selected for treatment based on a level of TDCA that is lower than a threshold value, for example in a stool of the subject or arising from a bile acid transforming functional assay incorporating fecal bacteria of the subject and a bile acid substrate, e.g., DCA. In another aspect, the at least one secondary bile acid is glycolithocholic acid (GLCA), and a subject is selected for treatment based on a level of GLCA that is lower than a threshold value, for example in a stool of the subject or arising from a bile acid transforming functional assay incorporating fecal bacteria of the subject and a bile acid substrate, e.g., LCA). In another aspect, the at least one secondary bile acid is lithocholic acid (LCA), and a subject is selected for treatment based on a level of LCA, for example in a stool of the subject or arising from a bile acid transforming functional assay incorporating fecal bacteria of the subject and a bile acid substrate, e.g., chenodeoxycholic acid. In another aspect, the at least one secondary bile acid is ursodeoxycholic acid (UDCA), and a subject is selected for treatment based on a level of UDCA, for example in a stool of the subject or arising from a bile acid transforming functional assay incorporating fecal bacteria of the subject and a bile acid substrate, e.g., LCA). In another aspect, the at least one secondary bile acid is glycoursodeoxycholic acid (GUDCA), and a subject is selected for treatment based on a level of GUDCA, for example in a stool of the subject or arising from a bile acid transforming functional assay incorporating fecal bacteria of the subject and a bile acid substrate, e.g., UDCA). In a still further aspect, the at least one secondary bile acid is tauroursodeoxycholic acid (TUDCA), and a subject is selected for treatment based on a level of TUDCA, for example in a stool of the subject or arising from a bile acid transforming functional assay incorporating fecal bacteria of the subject and a bile acid substrate, e.g., UDCA).

[0389] In an aspect, a pharmaceutical composition described herein can be administered to the subject based on a determination that the secondary bile acid produced by the fecal bacteria (e.g., directly from a stool or in a functional assay such as an ex vivo assay) is below a threshold level. For example, the threshold level can be 5 μM, 10 μM, 15 μM, 20 μM, 30 μM, 40 μM, 50 μM, 60 μM, 70 μM, 80 μM, 90 μM, 100 μM, 120 μM, 140 μM, 150 μM, 170 μM, 200 μM, 300 μM, 350 μM, 400 μM, 450 μM, or 500 μM. In another aspect, the threshold level is between 5 μM and 20 μM, 5 μM and 50 μM, 5 μM and 100 μM, and 5 μM and 150 μM, 5 μM and 200 μM, 5 μM and 800 μM, 10 μM and 20 μM, 10 μM and 50 μM, 10 μM and 100 μM, 10 μM and 150 μM, 10 μM and 200 μM, 50 μM and 100 μM, 50 μM and 200 μM, 100 μM and 200 μM, 200 μM and 400 μM, 200 μM and 600 μM, 400 μM and 800 μM, or 200 μM and 800 μM.

[0390] Herein a “subject in need thereof” can have a disease, disorder or condition disclosed herein, the treatment or alleviation of which can be facilitated by the administration of one or more bacterial species capable of transforming a primary bile acid to a secondary bile acid or converting between secondary bile acids. In an aspect, a subject is in need of treatment on the basis of the selection of such subject as a candidate who may benefit from supplementation with bile acid transforming bacteria by applying the methods disclosed herein. For example, a subject may be in need of treatment on the basis that a bile acid metabolism consensus sequence is absent in a microbiota of the subject or present in a number of bacterial clades that is below a threshold number, or if a level or rate of production of a secondary bile acid produced by fecal bacteria of the subject in a functional assay or present in stool of the subject is less than a threshold value.

[0391] In an aspect of the present disclosure, administration of a pharmaceutical composition to a subject in need results in one or more of (i) an increase in the absolute level or the concentration of one or more secondary bile acids in the intestine of the subject, or (ii) an increase in the secondary bile acid to primary bile acid ratio, without changing the overall abundance of bile acids, or (iii) an increase in the relative abundance of primary bile acid transforming bacteria compared to such relative abundance prior to treatment, or (iv) an increase in the relative abundance of secondary bile acid converting bacteria compared to such relative abundance prior to treatment, or (v) an increase in the level of expression of one or more of the genes FXR, PXR, LXR, TGR5 or ROR, compared to expression prior to treatment.

[0392] In a further aspect, the selection of a subject for treatment can vary depending on the presence, abundance or status of a characteristic or biomarker of the subject. Non-limiting examples of such characteristics or biomarkers include age, sex, medical history, comorbidity or history of drug or antibiotic administration, a level of gene expression of a host cell (e.g., FXR, PXR, LXR, TGR5 and ROR), the presence or abundance of a metabolite, a relative abundance of a non-secondary bile acid producing bacterial taxa in the fecal microbiota of the subject, and the abundance of a microbial or metabolic marker of an intestinal dysbiosis. Non-limiting examples of a marker of an intestinal dysbiosis include an abundance of the metabolite calprotectin, breath methane to hydrogen ratio, intestinal inflammation, Firmicutes/Bacteroidetes ratio, fecal microbial diversity, gut permeability, and fecal short-chain fatty acid (SCFA) level. In another aspect, a subject in need of a treatment comprises a reduced relative abundance of a bacterial taxa selected from the group consisting of Firmicutes, Bacteroidetes, Actinobacteria, Bacteroides, Faecalihacterium, Clostridium, Ruminococcus, Coprococcus, Eubacterium, Dorea, Blautia, Roseburia, Butyrivibrio, Subdoligramium, and Anaertostipes. In another aspect, a subject in need of a treatment comprises a reduced relative abundance of a bacterial taxa selected from the group consisting of Bacteroides, Parabacteroides, Butyricimonas, Odoribacter, Porphyromonas, Alistipes, and a combination thereof. In an aspect a subject in need of treatment comprises a lower ratio of secondary bile acids to primary bile acids compared to a healthy human donor, or a reduced abundance or concentration of secondary bile acids compared to a healthy human donor.

[0393] In an aspect, a subject administered a pharmaceutical composition (e.g., comprising a bacterial mixture) can be monitored and/or tested for remediation or alleviation of a bile acid deficiency following the administration. For example, metagenomic sequence data generated from the subject's microbiota following treatment can be analyzed for the presence of bacterial clades having a bile acid metabolism consensus sequence, and the number of bacterial clades having the consensus sequence compared to such number of bacterial clades prior to treatment. Alternatively or in addition, a level or presence of one or more secondary bile acids can be quantified directly from a stool of the subject, or a level or presence of one or more secondary bile acids produced by the fecal bacteria in a functional assay (e.g., an in vivo assay) can be determined. In various aspects, such analyses to verify or test the efficacy of a treatment in alleviating a deficiency in secondary bile acid metabolism can be performed at least 6 hours, at least 12 hours, at least 18 hours, at least 24 hours, at least 1 day, at least 2 days, at least 3 days, at least 4 days, at least 5 days, at least 6 days, at least 7 days, at least 1 week, at least 2 weeks, at least 3 weeks, at least 4 weeks, at least 5 weeks, at least 6 weeks, at least 7 weeks, at least 8 weeks, at least 9 weeks, at least 10 weeks, at least 11 weeks, at least 12 weeks, at least 13 weeks, at least 14 weeks, at least 15 weeks, or at least 16 weeks following administration of a pharmaceutical composition.

[0394] In an aspect, a method comprises determining using the methods provided herein that a subject has a deficiency in bile acid metabolism, administering a first dose of a pharmaceutical composition described herein based on such determination, determining again that the subject continues to have a deficiency in bile acid metabolism following administration, and administering a second dose of the pharmaceutical composition based on such second determination. In an aspect, the first dose is equal to or lower than the second dose. In another aspect, the second dose is equal to or lower than the first dose.

[0395] In one aspect of the present disclosure, methods provide for treating a subject in need thereof comprising: (1) administering to the subject a first pharmaceutically active dose of a pharmaceutical composition comprising a consortium of fecal bacteria from a single donor; (2) testing of the subject to determine efficacy, if an additional dose is necessary, or if the dose should be adjusted; (3) administration of a second pharmaceutical composition comprising a consortium of fecal bacteria blended from multiple donors; (4) optionally testing of the subject to determine efficacy, if an additional dose is necessary, or if the dose should be adjusted; and (5) optionally administrating a third pharmaceutical composition comprising a consortium of fecal bacteria blended from multiple donors, where the multiple donors (a) comprise all donors used to produce the second pharmaceutical composition and additional donors, (b) comprise donors not used to produce the second pharmaceutical composition, (c) comprise some but not all of the donors used to produce the second pharmaceutical composition, or (d) comprise only donors not used to produce the second pharmaceutical composition. In another aspect, the first, second, and third pharmaceutical compositions are administered in a different order (i.e., first, third, second; third, second, first; third, first, second; second, first, third, etc.).

[0396] Methods for measuring change and/or improvement in GI tract function can include, but are not limited to: endoscopy for direct examination of epithelium and mucosa; histological evaluation and/or tissue procurement for direct evaluation of structural changes and/or immune biomarkers; urine tests for assessment of permeability with non-absorbable sugars and LPS levels; stool tests for assessment of inflammation and/or microbiota changes (for example by PCR); and/or blood tests for assessment of specific markers, including CD4+ cell counts, Th17 cell counts, and/or LPS levels.

[0397] In another aspect, disclosed herein are a plurality of pharmaceutical compositions, e.g., two or more pharmaceutical compositions, as disclosed herein, for use in the prevention or treatment of a condition, disease, or disorder in a subject in need thereof. In aspects, a first composition comprises one or more bacterial isolates described herein. In aspects, a second composition comprises a consortium of fecal bacteria (e.g., a consortium of fecal bacteria or a fermented fecal microbiota). A subject can be treated with the first and second compositions in any order to treat or prevent a disorder. For example, in one aspect a subject is treated with a composition comprising a consortium of fecal bacteria, followed by a composition comprising one or more bacterial isolates. In another aspect, a subject is treated with a composition comprising one or more bacterial isolates followed by a composition comprising a consortium of fecal bacteria. In still other aspects, a subject can be treated with a composition comprising one or more bacterial isolates and a composition comprising a consortium of fecal bacteria simultaneously (for example, with a composition comprising both the bacterial isolate(s) and the consortium, or with multiple compositions each comprising one of the bacterial isolate(s) or a consortium of fecal bacteria).

[0398] In an aspect, a method for treating or preventing a condition, disease or disorder of a subject comprises administration to the subject of: (i) a pharmaceutical composition comprising one or more bacterial isolates; and (ii) a consortium of fecal bacteria. For example, the one or more bacterial isolates can be administered before or after the consortium of fecal bacteria, or at the same time (e.g., in different compositions or together in the same composition). In another aspect, a method for treating a disorder of a subject comprises administration to the subject of: (i) a pharmaceutical composition comprising a bacterial mixture (e.g., comprising a consortium of fecal bacteria); and (ii) one or more antibiotics. Typically, the antibiotic is administered to the subject prior to administration of the bacterial mixture, in order to purge the subject's intestine of harmful and/or pathogenic bacteria prior to replenishment of the gut with bacteria from the bacterial mixture. In an aspect, a method for treating a disorder of a subject comprises administration to the subject of: (i) a pharmaceutical composition comprising a bacterial mixture (e.g., comprising a consortium of fecal bacteria); and (ii) a prebiotic. For example, the bacterial mixture can be administered before or after the prebiotic, or at the same time (e.g., in different compositions or together in the same composition). For each of the above examples, it is further understood that any given component in a method of treatment can be administered multiple times. For example, a consortium of fecal bacteria can be administered to the subject, followed by one or more bacterial isolates, followed by a second administration of a consortium of fecal bacteria.

[0399] In an aspect, a method for treating or preventing a condition, disease or disorder of a subject comprises administration to the subject of: (i) a pharmaceutical composition comprising one or more bacterial isolates; (ii) a consortium of fecal bacteria; and (iii) one or more antibiotics. The different components of (i)-(iii) can be administered to the subject in any order. For example, a subject can be administered one or more antibiotics, followed by a consortium of fecal bacteria, followed by one or more bacterial isolates. In another example, the subject can be administered one or more antibiotics, followed by one or more bacterial isolates, followed by a consortium of fecal bacteria. For each of the above examples, it is further understood that any given component in a method of treatment can be administered multiple times. For example, an antibiotic can be administered to the subject, followed by a consortium of fecal bacteria, followed by one or more bacterial isolates, followed by a second administration of a consortium of fecal bacteria.

[0400] In an aspect, a method for treating or preventing a condition, disease or disorder of a subject comprises administration to the subject of: (i) a pharmaceutical composition comprising one or more bacterial isolates; (ii) a consortium of fecal bacteria; and (iii) one or more prebiotics. The different components of (i)-(iii) can be administered to the subject in any order. For example, a subject can be administered one or more prebiotics, followed by a consortium of fecal bacteria, followed by one or more bacterial isolates. In another example, the subject can be administered one or more prebiotics, followed by one or more bacterial isolates, followed by a consortium of fecal bacteria. In another example, the subject can be administered one or more prebiotics following administration of one or both of the one or more bacterial isolates and/or a consortium of fecal bacteria. For each of the above examples, it is further understood that any given component in a method of treatment can be administered multiple times. For example, a consortium of fecal bacteria can be administered to a subject, followed by a one or more bacterial isolates, followed by a prebiotic, followed by a second administration of a consortium of fecal bacteria.

[0401] In an aspect, a method for treating or preventing a condition, disease or disorder of a subject comprises administration to the subject of: (i) a pharmaceutical composition comprising one or more bacterial isolates; (ii) a consortium of fecal bacteria; (iii) one or more prebiotics; and (iv) one or more antibiotics. The different components of (i)-(iv) can be administered to the subject in any order. For example, a subject can be administered one or more antibiotics, followed by one or more prebiotics, followed by a consortium of fecal bacteria, followed by one or more bacterial isolates. In another example, the subject can be administered one or more antibiotics, followed by one or more prebiotics, followed by one or more bacterial isolates, followed by a consortium of fecal bacteria. In another example, the prebiotic can be administered after one or both of the one or more bacterial isolates and/or the consortium of fecal bacteria. For each of the above examples, it is further understood that any given component in a method of treatment can be administered multiple times. For example, an antibiotic can be administered to a subject, followed by a consortium of fecal bacteria, followed by one or more bacterial isolates, followed by a prebiotic, followed by a second administration of a consortium of fecal bacteria.

[0402] In each of the above combination treatments, the duration of time between different treatments (e.g., between administration of a consortium of fecal bacteria and one or more bacterial isolates) can be at least 1 hour, at least 2 hours, at least 6 hours, at least 12 hours, at least 1 day, at least 2 days, at least 3 days, at least 4 days, at least 5 days, at least 6 days, at least 1 week, at least 2 weeks, at least 3 weeks, at least 4 weeks, at least 5 weeks, at least 6 weeks, at least 7 weeks, at least 8 weeks, or greater than 8 weeks.

[0403] In one aspect, a subject being treated by administering a composition described herein is a subject already with a disorder (e.g., IBD, ulcerative colitis, Crohn's disease, ASD, hepatitis B or hepatic encephalopathy). In another aspect, a pharmaceutical composition is administered to a clinically asymptomatic human subject who is genetically predisposed or prone to a disorder (e.g., IBD, ulcerative colitis, Crohn's disease, ASD, hepatitis B or hepatic encephalopathy) is also useful in preventing the onset of clinical symptoms. A human subject genetically predisposed or prone to a disorder can be a human subject having a close family member or relative exhibiting or having suffered the disorder. In another aspect, a subject being treated by administering a composition described herein is a subject in which a disorder is to be prevented. In another aspect, a subject being treated by administering a composition described herein is predisposed or susceptible to a disorder. In another aspect, a subject being treated by administering a composition described herein is a subject diagnosed as having a disorder. In one aspect, a subject being treated by administering a composition described herein is a patient in need thereof.

[0404] In one aspect, the present disclosure provides a method for treating a subject in need thereof, where the method comprises administering to the subject multiple pharmaceutically active doses of a pharmaceutical composition comprising a bacterial mixture, such that different doses comprise a consortium of fecal bacteria derived from different carefully screened, healthy donors. In an aspect, a subject is administered a pharmaceutical composition over a dosing period wherein a first dose comprises at least one pharmaceutical composition comprising a consortium of fecal bacteria of a single donor, and a second dose of a pharmaceutical composition comprises a consortium of fecal bacteria of a single donor different from the donor of the first dose. In another aspect, a first dose comprises a pharmaceutical composition comprising a consortium of fecal bacteria of a single donor and a second dose comprises a consortium of fecal bacteria of a donor pool. The first and second dose do not indicate the order of administration to a subject, but rather that the consortium of fecal bacteria from different donors may be used in a non-blended form. In yet another aspect, the consortium of fecal bacteria from multiple carefully screened, healthy donors is provided in a blended form.

[0405] In an aspect, a pharmaceutical composition used herein comprises a bacterial mixture comprising a consortium of fecal bacteria derived from a donor with preselected desirable characteristics or receiving certain pre-treatment(s). In an aspect, a donor has no current or previous diagnosis or has no symptom of a disorder (e.g., IBD, ulcerative colitis, Crohn's disease, ASD, hepatitis B or hepatic encephalopathy) to be treated with a consortium of fecal bacteria derived from the donor. In another aspect, a donor has no family member or direct relative diagnosed with a disorder or exhibiting a symptom of a disorder to be treated with a consortium of fecal bacteria derived from the donor. In another aspect, a donor has no siblings, parents, or children diagnosed with or exhibiting a symptom of a disorder to be treated with a consortium of fecal bacteria derived from the donor. In an aspect, a donor has not previously received any fecal microbiota transplantation. In an aspect, a fecal donor previously donated a stool for treating a GI disorder, e.g., a C. difficile infection or IBD.

### Manufacture of Compositions

[0406] In a further aspect, provided herein is use of a bacterial mixture described herein for manufacture of a medicament for alleviating or rescuing a deficiency in bile acid metabolism, for treating a disorder described herein or for reducing the severity of one or more symptoms of a disorder described herein.

[0407] Provided herein are pharmaceutical compositions comprising fecal bacteria (e.g., a consortium of fecal bacteria or one or more bacterial isolates) selected to produce one or more secondary bile acids in an intestine of a subject administered the composition. In aspects, a method of manufacturing a composition comprises selecting fecal bacteria of stool of a donor on the basis of any one of the following: (i) determining that the fecal bacteria comprise one or more clades of bile acid producing bacteria, e.g., by identifying one or more bile acid metabolism consensus sequences in the fecal bacteria, (ii) determining that the relative abundance of fecal bacteria comprising one or more clades of bile acid producing bacteria is above a threshold value, or (iii) determining that the fecal bacteria are capable of producing one or more secondary bile acids at or above a threshold level, for example by quantifying a secondary bile acid from stool of the donor or via an ex vivo assay. For example, in the case of an ex vivo assay, where fecal bacteria extracted from stool of a donor produce one or more secondary bile acids at or above a threshold level, then fecal bacteria from stool of the donor (either the same stool used to extract bacteria for the assay or a different stool) can be selected for incorporation into the bacterial mixture.

[0408] The present disclosure contemplates that any method, assay, test or protocol described herein to select a subject for treatment can also be used to select a donor, or stool or a consortium of fecal bacteria of a donor comprising bacteria capable of producing one or more secondary bile acids when administered to a subject. For example, in an aspect, a method comprises determining the presence or an amount of one or more secondary bile acids in stool of a donor (i.e., harboring fecal bacteria), extracting fecal bacteria from stool of the donor (e.g., as a consortium of fecal bacteria extracted from the same stool or a different stool) to produce a consortium of fecal bacteria, and incorporating the fecal bacteria into the pharmaceutical composition based on the presence or the amount of the one or more secondary bile acids in the stool. In another aspect, a method comprises extracting fecal bacteria from stool of a donor, directly determining an ability or potential of the fecal bacteria to produce one or more secondary bile acids (e.g., at or above a threshold level), and incorporating the fecal bacteria (e.g., as a consortium of fecal bacteria extracted from the same stool or a different stool) into a pharmaceutical composition based on the ability of the fecal bacteria to produce the one or more secondary bile acids. In another aspect, a method comprises determining a quantity or relative abundance of one or more clades of bile acid transforming bacteria from stool of a donor, and incorporating fecal bacteria from stool of the donor (e.g., as a consortium of fecal bacteria extracted from the same stool or a different stool) into a pharmaceutical composition based on the quantity or relative abundance of the bacterial clades.

[0409] In an aspect, fecal bacteria of a stool of a donor can be incorporated into a pharmaceutical composition on the basis that the number of clades of bacteria comprising a bile acid metabolism consensus sequence is at or above a threshold value. In an aspect, the fecal bacteria are selected if the number of clades of bacteria is at least one, at least two, at least three, at least four, at least five, at least six, at least seven, at least eight, at least nine, at least ten, at least eleven, at least twelve, at least thirteen, at least fourteen, at least fifteen, at least sixteen, at least seventeen, at least eighteen, at least nineteen, or at least twenty. The number of clades of bile acid transforming bacteria in a consortium of fecal bacteria of a donor can be determined by identifying the number of clades of bacteria having a bile acid metabolism consensus sequence using metagenomics sequencing data derived from a consortium of fecal bacteria of a donor. In an aspect, the bile acid metabolism consensus sequence comprises or is indicative of or adjacent to one or more bai genes or a bai operon. In certain instances, fecal bacteria can be selected when the relative abundance of one or more bile acid transforming bacterial clades is at or above a threshold value.

[0410] Any method known in the art can be used to determine or quantify an amount of a secondary bile acid from a stool.

[0411] In various aspects, fecal bacteria of stool of a donor are selected for incorporation into a pharmaceutical composition on the basis of the presence or abundance of a secondary bile acid, wherein the secondary bile acid is selected from the group consisting of deoxycholic acid (DCA), isodeoxycholic acid, glycodeoxycholic acid (GDCA), taurodeoxycholic acid (TDCA), glycolithocholic acid (GLCA), taurolithocholic acid (TLCA), lithocholic acid (LCA), isoalloLCA, ursodeoxycholic acid (UDCA), isoursodeoxycholic acid, glycoursodeoxycholic acid (GUDCA), tauroursodeoxycholic acid (TUDCA) and a combination thereof. In various aspects, fecal bacteria of stool of a donor are selected for incorporation into a pharmaceutical composition on the basis of the presence or abundance of a secondary bile acid, wherein the secondary bile acid is isoalloLCA. In aspects, the fecal bacteria can be incorporated on the basis that the one or more secondary bile acids are present in the stool at or above a threshold level. For example, the threshold level can be 200 μM, 250 μM 300 μM, 350 μM, 400 μM, 450 μM, 500 μM, 550 μM, 600 uM, 650 μM, 700 μM, 750 μM, 800 μM, 850 μM, 900 μM, 950 μM, 1000 μM, 1100 μM, 1200 μM, 1300 μM, 1400 μM, 1500 μM, 1600 μM, 1700 μM, 1800 μM, 1900 μM, 2000 μM or greater than 2000 μM.

[0412] In an aspect, a method comprises directly determining an ability or potential of fecal bacteria from stool of a donor to produce one or more secondary bile acids (e.g., at or above a threshold level), and incorporating a preparation of uncultured fecal bacteria prepared from stool of the same donor (e.g., the same stool or a different stool) into a pharmaceutical composition based on the ability or potential of the fecal bacteria to produce the one or more secondary bile acids. In this aspect, intestinal bacteria are screened or assayed in real time for their ability to produce a secondary bile acid by metabolizing one or more substrates during an incubation period. Any functional assay or ex vivo assay known to a person skilled in the art can be used to assay the bacteria for their ability to produce the bile acid. Typically in such functional assays the fecal bacteria are at least partially purified, extracted or harvested from non-bacterial stool matter (e.g., fiber) prior to incubating the bacteria with a substrate. This method for screening fecal bacteria for an ability to produce a secondary bile acid is advantageous in that it identifies a source of fecal bacteria (e.g., the stool from which a sample of bacteria is extracted) known to be viable and functionally capable of generating a secondary bile acid. Bacterial cells from a remaining portion of the stool (i.e., not used in performing the assay), or from a different stool of the same donor, can then be incorporated into a bacterial mixture for incorporation into a pharmaceutical composition. In a non-limiting example of an ex vivo assay, a sample of raw stool from a donor (e.g., about 10 ml) can be homogenized and centrifuged, the pellet resuspended in buffer (e.g., sodium phosphate buffer), and the fecal bacteria incubated with one or more primary or secondary bile acid substrates, as described above.

[0413] In an aspect, a functional assay comprises exposing fecal bacteria of a donor (e.g., a consortium of fecal bacteria) to a primary bile acid for a period of time (e.g., at least 1 at least 2, at least 3, at least 4, at least 5, at least 6, at least 7, at least 8, at least 9, at least 10, at least 11, at least 12, at least 13, at least 14, at least 15, at least 16, at least 17, at least 18, at least 19, at least 20, at least 21, at least 22, at least 23, at least 24 at least 30, at least 36 hours, at least 42 hours, at least 48, at least 54, at least 60, or greater than 60 hours) and determining the rate of conversion of the primary bile acid to its corresponding bile acid. In an aspect, the primary bile acid is CA and the secondary bile acid is DCA. In another aspect, the primary bile acid is CDCA and the secondary bile acid is LCA. In an aspect the secondary bile acid is isoalloLCA. In various aspects, a determination of the rate of conversion or transformation comprises (i) comparing the level of primary bile acid substrate at the beginning and end of the assay, (ii) determining a level of secondary bile acid at the end of the assay, and/or comparing a ratio of the secondary bile acid to the primary bile acid at the beginning and end of the assay. In an aspect, a donor or stool from a donor can be selected on the basis that a ratio of secondary to primary bile acids existing at the end of the functional assay (e.g., during a period of less than 24 hours or less than 12 hours) is greater than 1. In another aspect, a subject can benefit from treatment or can be selected for treatment on the basis that a ratio of secondary to primary bile acids existing at the end of the functional assay (e.g., during a period of less than 24 hours or less than 12 hours) is greater than 0.5. In another aspect, a subject can benefit from treatment or can be selected for treatment on the basis that a ratio of secondary to primary bile acids existing at the end of the functional assay (e.g., during a period of less than 24 hours or less than 12 hours) is greater than 3, greater than 2.5, greater than 2, greater than 1.9, greater than 1.8, greater than 1.7, greater than 1.6, greater than 1.5, greater than 1.4, greater than 1.3, greater than 1.2, greater than 1.1, greater than 1, greater than 0.9, greater than 0.8, greater than 0.7, greater than 0.6, or greater than 0.5.

[0414] In an aspect, a subject is selected as potentially benefiting from administration with a composition described herein, or for treatment with a composition described herein, based on determining that a level or concentration of at least one secondary bile acid in a stool of the subject or arising from a functional assay (or a ratio of a secondary to primary bile acid in a stool or arising from a functional assay) is greater than a threshold level, wherein the secondary bile acid is selected from the group consisting of deoxycholic acid (DCA), isodeoxycholic acid, glycodeoxycholic acid (GDCA), taurodeoxycholic acid (TDCA), glycolithocholic acid (GLCA), taurolithocholic acid (TLCA), lithocholic acid (LCA), isoalloLCA, ursodeoxycholic acid (UDCA), isoursodeoxycholic acid, glycoursodeoxycholic acid (GUDCA), tauroursodeoxycholic acid (TUDCA) or a combination thereof.

[0415] In an aspect, a donor or a stool or a donor is selected for manufacturing a composition described herein on the basis of a ratio of total secondary bile acids to total primary bile acids in a stool being greater than a threshold value. In an aspect, the subject is selected if the ratio of total secondary bile acids to total primary bile acids is greater than 3, greater than 2.5, greater than 2, greater than 1.9, greater than 1.8, greater than 1.7, greater than 1.6, greater than 1.5, greater than 1.4, greater than 1.3, greater than 1.2, greater than 1.1, greater than 1, greater than 0.9, greater than 0.8, greater than 0.7, greater than 0.6, or greater than 0.5.

[0416] In another aspect, a donor or a stool of a donor is selected if the ratio of a secondary bile acid to its corresponding primary bile acid in a stool of the subject is greater than a threshold value. In an aspect, the ratio of secondary bile acid to primary bile acid is selected from the group consisting of DCA:CA, LCA:CDCA, 12-oxoLCA:CA, 3-oxoCA:CA, 7-oxoDCA:CA, 3-oxoLCA:CDCA, 7-oxoLCA:CDCA, and a combination thereof. In an aspect, a donor or stool of a donor is selected if the ratio of the secondary bile acid to its corresponding primary bile acid in a stool of the subject is greater than 3, greater than 2.5, greater than 2, greater than 1.9, greater than 1.8, greater than 1.7, greater than 1.6, greater than 1.5, greater than 1.4, greater than 1.3, greater than 1.2, greater than 1.1, greater than 1, greater than 0.9, greater than 0.8, greater than 0.7, greater than 0.6, or greater than 0.5.

[0417] In a further aspect, a donor or a stool of a donor is selected if the ratio of a second secondary bile acid to a first secondary bile acid in a stool of the subject is greater than a threshold value. In an aspect, the ratio of second secondary bile acid to first secondary bile acid is selected from the group consisting of IDCA:DCA, GDCA:DCA, TDCA:DCA, GLCA:LCA, TLCA:LCA, UDCA:LCA, isoLCA:3-oxoLCA, isoalloLCA:3-oxoLCA, 3-oxoalloLCA:3-oxoLCA, or a combination thereof. In an aspect, the subject is selected if the ratio of the secondary bile acid to its corresponding primary bile acid in a stool of the subject is greater than 3, greater than 2.5, greater than 2, greater than 1.9, greater than 1.8, greater than 1.7, greater than 1.6, greater than 1.5, greater than 1.4, greater than 1.3, greater than 1.2, greater than 1.1, greater than 1, greater than 0.9, greater than 0.8, greater than 0.7, greater than 0.6, or greater than 0.5.

[0418] In various aspects, fecal bacteria of stool of a donor are selected for incorporation into a pharmaceutical composition on the basis of a determination (e.g., using a functional assay) that fecal bacteria of stool of the donor are capable of producing a secondary bile acid at or above a threshold level. In an aspect, the threshold level. For example, the threshold level can be 200 μM, 250 μM 300 μM, 350 μM, 400 μM, 450 μM, 500 μM, 550 μM, 600 uM, 650 μM, 700 μM, 750 μM, 800 μM, 850 μM, 900 μM, 950 μM, 1000 μM, 1100 μM, 1200 μM, 1300 μM, 1400 μM, 1500 μM, 1600 μM, 1700 μM, 1800 μM, 1900 μM, 2000 μM or greater than 2000 μM of the secondary bile acid.

[0419] In an aspect, a bacterial mixture is prepared from the same stool that is assayed to determine a suitability of fecal bacteria of the stool to be incorporated into a composition (e.g., directly by quantification of the secondary bile acids in the stool, via a functional assay that determines the level of secondary bile acids produced by fecal bacteria from the stool, or by determining a quantity or relative abundance of one or more clades of bile acid transforming bacteria). For example, a stool received from a donor can be divided into two or more portions, of which a first portion can be subjected to an assay for determining an ability of fecal bacteria of the stool to produce one or more bile acids, and a second portion (e.g., the remaining stool) can be stored and/or frozen until the determination is made. If the fecal bacteria of the first portion are determined to be capable of producing one or more secondary bile acids (e.g., by determining a level of the one or more secondary bile acids in the first portion to be at or above a threshold level, by determining a level of the one or more secondary bile acids produced by the fecal bacteria in a functional assay to be at or above a threshold level, or by determining a quantity or relative abundance of one or more clades or file acid transforming bacteria in the first portion to be at or above a threshold level), then the stored stool can be processed to produce a bacterial mixture for incorporation into a pharmaceutical composition. In another aspect, a bacterial mixture is prepared from fecal bacteria from a stool of the same donor, but a different stool than was used to determine the suitability of the fecal bacteria for incorporation into the pharmaceutical composition.

[0420] Disclosed herein is a method of selecting a stool donor comprising determining that fecal bacteria of stool of the donor can produce one or more secondary bile acids (e.g., at or above a threshold level), selecting stool of the donor (e.g., the same stool or different stool) based on the determination that the fecal bacteria can produce one or more secondary bile acids, and incorporating fecal bacteria of the selected stool into a pharmaceutical composition (e.g., as a consortium of fecal bacteria).

[0421] In an aspect, a method of selecting a human stool donor (or a method of selecting stool of a donor for producing a bacterial mixture) comprises determining that fecal bacteria of a plurality of stools of the donor can produce one or more secondary bile acids, for example by determining that a secondary bile acid is produced at or above a threshold level (e.g., in an ex vivo assay or by directly quantifying from stool) in multiple stools or by determining that a quantity or relative abundance of one or clades of bile acid transforming bacteria in multiple stools is at or above threshold level. In aspects, stool from the donor can be collected at different time points, such as 2, 3, 4, 5, 6, 7, 8, 9, 10, 11, 12, 13, 14, 15, 16, 17, 18, 19, 20, or greater than 20 time points, and the ability of fecal bacteria in each stool to produce one or more secondary bile acids determined at each time point. In an aspect, the plurality of stools collected from the donor are from successive bowel movements of the donor. In an aspect, the plurality of stools collected from the donor are collected on the same day. In an aspect, the plurality of stools collected from the donor are collected on different days. In an aspect, at least two of the plurality of stools collected from the donor are collected at least 1, at least 2, at least 3, at least 4, at least 5, at least 6, at least 7, at least 8, at least 9, at least 10, at least 11, at least 12, at least 13, at least 14, at least 15, at least 16, at least 17, at least 18, at least 19, at least 20, at least 21, at least 22, at least 23, at least 24, or greater than 24 hours apart. In an aspect, at least two of the plurality of stools collected from the donor are collected at least 1, at least 2, at least 3, at least 4, at least 5, at least 6, at least 7, or greater than 7 days apart. In an aspect, at least two of the plurality of stools collected from the donor are collected at least 1, at least 2, at least 3, at least 4, at least 5, at least 6, at least 7, at least 8, at least 9, at least 10, at least 11, at least 12, at least 13, at least 14, at least 15, at least 16, at least 17, at least 18, at least 19, at least 20, or greater than 20 weeks apart. In an aspect, at least two of the plurality of stools collected from the donor are collected at least 1, at least 2, at least 3, at least 4, at least 5, at least 6, at least 7, at least 8, at least 9, at least 10, at least 11, at least 12, or greater than 12 months apart.

[0422] Provided herein is a method of selecting a stool donor (or a method of selecting stool of a donor for producing a bacterial mixture) comprising determining that fecal bacteria from a first stool of an individual can produce one or more secondary bile acids, determining that fecal bacteria of a second stool of the individual (e.g., collected at a different time point) can produce one or more bile acids, and selecting the individual as the stool donor based on determining that fecal bacteria from the first and the second stools produce the one or more bile acids. The method can further comprise extracting fecal bacteria from stool of the selected donor for incorporating into a pharmaceutical composition (e.g., as a consortium of fecal bacteria).

[0423] In an aspect, the donor is selected based on determining from at least 2, at least 3, at least 4, at least 5, at least 6, at least 7, at least 8 at least 9, at least 10, at least 11, at least 12, at least 13, at least 14, at least 15, or greater than 15 stools that fecal bacteria of each stool can produce one or more bile acids. In an aspect, once a stool donor is selected, stool of the donor can be collected and fecal bacteria from the stool used to produce a consortium of fecal bacteria for incorporation into a pharmaceutical composition described herein.

[0424] In another aspect, prior to making a fecal donation, a stool donor can ingest one or more bacterial isolates (e.g., one or more bile acid transforming bacteria), for example in the form of one or more probiotics. In an aspect, a stool donor can ingest a bacterial isolate prior to donating a stool in order to introduce the bacterial isolate into fecal bacteria of the donated stool. Therefore, a bacterial isolate desirable for inclusion in a bacterial mixture of a pharmaceutical composition can be introduced into the fecal bacteria of a stool donor via ingestion of the bacterial isolate by the donor, thereby allowing a consortium of fecal bacteria to be prepared from the stool of the donor that is “ready-made” with, or already includes, a species or strain comprising bile acid transforming bacteria. A consortium of fecal bacteria prepared from the stool of a donor that has ingested a bacterial isolate (e.g., in the form of a probiotic) can be directly incorporated into a pharmaceutical composition described herein, without adding any additional bacterial isolate to the preparation, or alternatively can be further spiked or enriched with an additional dose of the bacterial isolate. Such “pre-spiking” of a stool donor's fecal microbiota with one or more desired bacterial strain or species originating as bacterial isolates dosed to a stool donor can be especially advantageous where a fecal microbiota of the donor does not endogenously comprise bacteria of the same taxonomic category as the bacterial isolate (e.g., phylum, class, order, family, genus, species, or strain), or does not endogenously comprise a bacterial strain or species having a genetic identity to the bacterial isolate that is above a threshold level (e.g., having a 16S rRNA sequence with greater than 97% identity, greater than 98% identity, greater than 99% identity, greater than 99.1% identity, greater than 99.2% identity, greater than 99.3% identity, greater than 99.4% identity, greater than 99.5% identity, greater than 99.6% identity, greater than 99.7% identity, greater than 99.8% identity, or greater than 99.9% identity to a 16S rRNA sequence of the bacterial isolate). In aspects, the probiotic or bacterial isolate comprises one or more of Clostridium, Bacillus, Bacteroides, Bifidobacterium, Catenibacterium, Collinsella, Eggerthella, Lachnospira, Lactobacillus, Parabacteroides, Peptoniphilus, Mediterraneibacter, Clostridium hiranonis, Clostridium hylemonae, Clostridium scindens, Ruminococcus gnavus, Coprococcus comes, Faecalibacterium prausnitzii, Eubacterium ventriosum, Bacteroides pectinophihs, Dorea formicigenerans, Eggerthela lenta, Parabacteroides merdae, Bacteroides dorei, Bacteroides vulgatus, and a combination thereof. In an aspect, the probiotic or bacterial isolate comprises one or more of Bacteroides, Parabacteroides, Butyricimonas, Odoribacter, Porphyromonas, Alistipes, and a combination thereof. In an aspect, the probiotic or bacterial isolate comprises one or more of Bacteroides uniformis, Bacteroides finegoldii, Bacteroides fragilis, Bacteroides dorei, Bacteroides vulgatus, Bacteroides caccae, Bacteroides ovatus, Bacteroides eggerthii, Bacteroides thetaiotaomicron, Parabacteroides goldsteinii, Parabacteroides distasonis, Parabacteroides merdae, Butyricimonas synergistica, Odoribacter laneus, Porphyromonas somerae, Alistipes indistinctus, Alistipes onderdonkii, Alistipes finegoldii, and a combination thereof.

[0425] In an aspect, a donor can ingest a probiotic comprising a bacterial isolate comprising bile acid transforming bacteria of a taxonomic category that is not detectable, or is present at a relative abundance below a threshold abundance, in a stool of the donor prior to ingestion of the probiotic. For example, the microbiota of a stool of a donor can be screened (e.g. using a nucleic acid hybridization technique such as PCR) for the presence of a particular taxa (phylum, class, order, family, genus, species, or strain) in the fecal microbiota of the donor. If the taxa either is not found in the fecal microbiota, or is present at a relative abundance below a threshold abundance, then the donor can be administered or ingest a probiotic comprising a bacterial isolate of that taxa.

[0426] In an aspect, a duration of time between ingestion of one or more bacterial isolates by a stool donor and collection of a stool from the donor (i.e., comprising a bacterial species originating from the one or more bacterial isolates) can vary; for example the duration can be at least 1 hour, at least 2 hours, at least 4 hours, at least 6 hours, at least 8 hours, at least 10 hours, at least 12 hours, at least 14 hours, at least 16 hours, at least 18 hours, at least 20 hours, at least 22 hours, at least 24 hours, at least 26 hours, at least 28 hours, at least 30 hours, at least 32 hours, at least 34 hours, at least 36 hours, at least 38 hours, at least 40 hours, at least 42 hours, at least 44 hours, at least 46 hours, at least 48 hours, at least 50 hours, at least 52 hours, at least 54 hours, at least 56 hours, at least 58 hours, at least 60 hours, at least 62 hours, at least 64 hours, at least 66 hours, at least 68 hours, at least 70 hours, at least 72 hours, or greater than 72 hours.

[0427] In an aspect, a donor can ingest a single or multiple doses of a bacterial isolate to facilitate the incorporation of the bacterial isolate into a fecal microbiota of the donor as a bacterial species. In one aspect, a dose of a bacterial isolate can be ingested by the donor at least once or twice daily for at least three consecutive days or weeks. In another aspect, a dose is ingested at least once, twice, or three times daily for a period between 1 and 16 weeks, between 2 and 16 weeks, between 3 and 16 weeks, between 4 and 16 weeks, between 5 and 16 weeks, between 6 and 16 weeks, between 7 and 16 weeks, between 8 and 16 weeks, between 10 and 16 weeks, between 12 and 16 weeks, between 1 and 12 weeks, between 2 and 12 weeks, between 3 and 12 weeks, between 4 and 12 weeks, between 5 and 12 weeks, between 6 and 12 weeks, between 7 and 12 weeks, between 8 and 12 weeks, between 9 and 12 weeks, between 10 and 12 weeks, between 1 and 2 weeks, between 2 and 3 weeks, between 3 and 4 weeks, between 4 and 5 weeks, between 5 and 6 weeks, between 6 and 7 weeks, between 7 and 8 weeks, between 8 and 9 weeks, between 9 and 10 weeks, or between 10 and 11 weeks.

[0428] Further provided herein are kits comprising any herein-disclosed pharmaceutical composition and instructions for use. For example, a kit can include one or more unit dosage forms comprising one or more bacterial mixtures. Such a kit could include for example one or more pharmaceutical compositions comprising a bacterial mixture (e.g., comprising a preparation of fecal bacteria), and optionally a delivery device to administer the composition to the subject, and instructions for administering the dosage to a subject via an appropriate delivery route. In some cases, the dosage form comprises any suitable form of live bacteria (fresh, frozen, lyophilized, etc.) and is formulated for administration to a human subject orally, by nasogastric tube, by colonoscopy, or anally. As described herein, dosage forms suitable for kits provided herein include, without limitation, liquid solutions, capsules, tablets, powders, granules, and lyophilized forms.

[0429] The instructions of a kit can describe, for example, dosing information of the one or more pharmaceutical compositions in the kit. As examples, the frequency of administration and dose of a composition, e.g., the number of capsules of a pharmaceutical composition to be administered at a given time, and the number of times of administration per day/week). In an aspect in which the kit comprises more than one composition (e.g., multiple bacterial mixtures or an additional pharmaceutical agent lacking a bacterial mixture), the instructions can describe the dosing of each composition. For example, one composition can be administered before another composition, e.g., sequential administration of the two pharmaceutical compositions separated by minutes, hours, days, weeks, months, or longer. Alternately, two compositions can be administered simultaneously.

[0430] It will be appreciated that compositions, dosage forms, and medicaments as described herein include combination pharmaceutical compositions in which one or more additional compounds or medications are added to or otherwise co-administered with a purified fecal microbiota composition.

[0431] In an aspect, the present disclosure provides for the following non-limiting embodiments:

1. A method of selecting a subject in need of supplementation with bile acid transforming bacteria that produce a secondary bile acid from a primary bile acid, the method comprising:
[0432] determining a number of bacterial clades or species in a microbiome of an individual that comprise a nucleic acid comprising a bile acid metabolism consensus sequence associated with production of the secondary bile acid from the primary bile acid; and
[0433] selecting the individual as the subject on the basis of determining that the number of bacterial clades or species is less than a threshold value.
   2. The method of embodiment 1, wherein the bile acid metabolism consensus sequence is at least 20 bp in length and includes all or a portion of a gene encoding a gene product that acts in a metabolic pathway that produces the secondary bile acid.
   3. The method of embodiment 2, wherein the gene is selected from the group consisting of a bai gene, a gene encoding 3α-hydroxysteroid dehydrogenase, a gene encoding 3β-hydroxysteroid dehydrogenase, a gene encoding 5β-reductase, a gene encoding 5α-reductase, a gene encoding 3β-HSDH, and a combination thereof.
   4. The method of any one of embodiments 1 to 3, further comprising the step of administering to the subject the bile acid transforming bacteria.
   5. The method of any one of embodiments 1 to 4, wherein the threshold value is less than five.
   6. The method of any one of embodiments 1 to 5, wherein the threshold value is one.
   7. A method of treating a deficiency in the metabolism of a primary bile acid to a secondary bile acid in a subject in need thereof, the method comprising:
[0434] administering a bacterial isolate to the subject to treat the deficiency, wherein the bacterial isolate comprises a bai gene.
   8. The method of embodiment 7, further comprising selecting the subject on the basis of the deficiency.
   9. The method of embodiment 8, wherein said selecting comprises determining from a functional assay that a level of the secondary bile acid is less than a threshold value.
   10. The method of embodiment 9, wherein the functional assay comprises exposing a consortium of fecal bacteria to a primary bile acid substrate and determining the ratio of secondary to primary bile acids.
   11. The method of embodiment 8, wherein said selecting comprises determining that a level of the secondary bile acid in a stool of the subject is less than a threshold value.
   12. The method of embodiment 8, wherein said selecting comprises determining that a level of the primary bile acid in a stool of the subject is greater than a threshold value.
   13. The method of embodiment 8, wherein said selecting comprises determining that no bacteria in a microbiome of the subject comprise a bai operon.
   14. The method of embodiment 8, wherein said selecting comprises determining that the number of bacterial clades or species in a microbiome of the subject comprising a bai operon is less than five.
   15. The method of any one of embodiments 7 to 14, wherein the administered bacterial isolate comprises a bai operon.
   16. The method of any one of embodiments 7 to 15, further comprising administering to the subject a consortium of fecal bacteria from a human donor.
   17. The method of embodiment 16, wherein the consortium of fecal bacteria comprises uncultured fecal bacteria.
   18. The method of embodiment 16, wherein the consortium of fecal bacteria comprises fermented fecal bacteria.
   19. The method of any one of embodiments 7 to 18, wherein the deficiency in metabolism of the primary bile acid to a secondary bile acid is associated with a disorder in the subject.
   20. The method of any one of embodiments 7 to 19, wherein the disorder is selected from the group consisting of inflammatory bowel disease, ulcerative colitis, Crohn's disease, hepatic encephalopathy, hepatitis B, an autism spectrum disorder and a C. difficile infection.
   21. The method of embodiment 16, wherein the bacterial isolate and the consortium of fecal bacteria from a human donor are administered simultaneously.
   22. A method of manufacturing a pharmaceutical composition for administration to a subject to alleviate a deficiency in bile acid metabolism, the method comprising:
[0435] selecting a bacterial isolate from a stool of a human donor on the basis of a sequence identity of a nucleic acid of the bacterial isolate to a nucleic acid of a bacterial clade or species in a fecal microbiota of a subject who does not have a history of or is in remission from a disorder related to an intestinal dysbiosis, wherein the nucleic acid comprises a bile acid metabolism consensus sequence that codes for all or a portion of an enzyme that functions in a metabolic pathway producing a primary or a secondary bile acid, and wherein the sequence identity is at least 97%; and
[0436] incorporating the bacterial isolate into the pharmaceutical composition.
   23. The method of embodiment 22, wherein the bile acid metabolism consensus sequence comprises a bai gene.
   24. The method of embodiment 22, wherein the subject is in remission as a result of being administered a fecal microbiota transplant (FMT).
   25. The method of embodiment 24, wherein the bacterial clade or species was either not present in the subject prior to the FMT, or was present at a reduced relative abundance in the subject prior to the FMT.
   26. The method of any one of embodiments 22 to 25, wherein the disorder is selected from the group consisting of inflammatory bowel disease, ulcerative colitis, Crohn's disease, hepatic encephalopathy, hepatitis B, an autism spectrum disorder and a C. difficile infection.
   27. The method of any one of embodiments 22 to 25, wherein the sequence identity is at least 99%.
   28. A method, comprising:
[0437] selecting a stool of a donor on the basis of the presence of one or more bile acid metabolizing bacteria in the donor, wherein the one or more bile acid metabolizing bacteria are capable of producing a bile acid by transforming a primary bile acid to a secondary bile acid or a first secondary bile acid to a second secondary bile acid;
[0438] isolating the one or more bile acid metabolizing bacteria; and
[0439] incorporating the isolated bile acid metabolizing bacteria into a pharmaceutical composition.
   29. The method of embodiment 28, wherein the bile acid metabolizing bacteria are capable of transforming a primary bile acid to a secondary bile acid, and the primary bile acid is selected from the group consisting of cholic acid, chenodeoxycholic acid and a combination thereof.
   30. The method of embodiment 28, wherein the bile acid metabolizing bacteria are capable of converting a first secondary bile acid to a second secondary bile acid, and the secondary bile acid is selected from the group consisting of deoxycholic acid (DCA), isodeoxycholic acid, glycodeoxycholic acid (GDCA), taurodeoxycholic acid (TDCA), glycolithocholic acid (GLCA), taurolithocholic acid (TLCA), lithocholic acid (LCA), ursodeoxycholic acid (UDCA), isoursodeoxycholic acid, glycoursodeoxycholic acid (GUDCA), tauroursodeoxycholic acid (TUDCA) or a combination thereof.
   31. The method of any one of embodiments 28 to 30, wherein the one or more bile acid metabolizing bacteria are determined to be present in the donor if a secondary bile acid in stool of the donor is above a threshold level.
   32. The method of any one of embodiments 28 to 30, wherein the one or more bile acid metabolizing bacteria are determined to be present in the donor if a secondary bile acid is produced in a functional assay above a threshold level, wherein the functional assay exposes fecal bacteria of stool of the donor to a bile acid substrate.
   33. The method of embodiment 32, wherein the bile acid substrate is a primary bile acid.
   34. The method of embodiment 33, wherein the bile acid substrate is a secondary bile acid.
   35. The method of embodiment 28, wherein the one or more bile acid metabolizing bacteria are determined to be present in the donor if stool of the donor comprises fecal bacteria having a bile acid metabolism consensus sequence comprising all or a portion of a sequence encoding an enzyme functioning in a metabolic pathway that produces the bile acid.
   36. The method of embodiment 35, wherein the bile acid metabolism consensus sequence comprises a bai gene.
   37. The method of any one of embodiments 28 to 36, wherein the one or more bile acid transforming bacteria are incorporated into the pharmaceutical composition as a consortium of fecal bacteria comprising multiple species of bacteria derived from a single human donor.
   38. A method of treating inflammatory bowel disease in a subject in need thereof, the method comprising:
[0440] determining that a fecal microbiota of the subject comprises one or fewer bacterial clades or species capable of transforming a primary bile acid to a secondary bile acid; and
[0441] administering to the subject a bacterial species comprising one or more bai genes.
   39. A method of treating a secondary bile acid deficiency in a subject comprising a microbiota lacking a functional bai operon, the method comprising administering to the subject a bacterial species comprising the functional bai operon.
   40. The method of embodiment 39, wherein the subject comprises an intestinal microbiota that lacks the functional bai operon.
   41. A method of restoring a bai operon to a microbiome of a subject lacking a functional copy of the bai gene operon, the method comprising administering to the subject a bacterial isolate comprising the bai gene operon.
   42. The method of any one of embodiments 39 to 41, wherein the bai operon converts CDCA to LCA or CA to DCA.
   43. The method of embodiment 39, wherein said species comprises one or more, two or more, three or more, four or more, five or more, ten or more, fifteen or more, twenty or more strains that comprise the bai operon.
   44. The method of embodiment 39, wherein said species is administered to the subject in the form of a bacterial isolate.
   45. The method of embodiment 39, wherein said species is administered to the subject in the form of multiple bacterial isolates.
   46. A method of treating a disorder related to an intestinal dysbiosis in a subject in need thereof, the method comprising:
[0442] determining that a fecal microbiota of the subject comprises three or fewer bacterial clades or species comprising a bile acid metabolism consensus sequence, wherein a bacterial clade or species comprising the bile acid metabolism consensus sequence produces a gene product that catalyzes a step in a metabolic pathway that converts a first secondary bile acid to a second secondary bile acid; and
[0443] administering to the subject one or more bile acid metabolizing bacteria comprising a gene encoding the gene product.
   47. A method of treating a subject in need of supplementation with bile acid converting bacteria, the method comprising:
[0444] determining a number of bacterial clades or species in a microbiome of an individual that comprise a nucleic acid comprising a bile acid metabolism consensus sequence;
[0445] selecting the individual as the subject on the basis of determining that the number of bacterial clades or species is less than a threshold value; and
[0446] administering to the subject the bile acid converting bacteria;
[0447] wherein the bile acid converting bacteria comprise bacteria that produce isoalloLCA.
   48. A method of treating a subject in need of supplementation with bile acid converting bacteria, the method comprising:
[0448] determining a deficiency of a secondary bile acid in the subject,
[0449] wherein the deficient secondary bile acid comprises at least isoalloLCA; and
[0450] administering to the subject bile acid converting bacteria, wherein following administration the bile acid converting bacteria produce the isoalloLCA in the subject.
   49. The method of embodiment 48, wherein the determining is based on a functional assay that determines a presence or level of a secondary bile acid.
   50. The method of embodiment 48, wherein the determining is based on a functional assay that determines a presence or level of a bile acid converting bacteria.
   51. The method of embodiment 49 or 50, wherein the functional assay is a TGR5 reporter cell assay.
   52. The method of any one of embodiments 47 to 51, wherein the bile acid converting bacteria comprise bacteria from one or more genus selected from the group consisting of Bacteroides, Parabacteroides, Butyricimonas, Odoribacter, Porphyromonas, Alistipes, and a combination thereof.
   53. The method of any one of embodiments 47 to 52, wherein the bile acid converting bacteria comprise bacteria from one or more species selected from the group consisting of Bacteroides uniformis, Bacteroides finegoldii, Bacteroides fragilis, Bacteroides dorei, Bacteroides vulgatus, Bacteroides caccae, Bacteroides ovatus. Bacteroides eggerthii, Bacteroides thetaiotaomicron, Parabacteroides goldsteinii, Parabacteroides distasonis, Parabacteroides merdae, Butyricimonas synergistica, Odoribacter laneus, Porphyromonas somerae, Alistipes indistinctus, Alistipes onderdonkii, Alistipes finegoldii, and a combination thereof.
   54. A method of manufacturing a pharmaceutical composition for administration to a subject to alleviate a deficiency in bile acid metabolism, the method comprising:
[0451] selecting a donor based on a presence of isoalloLCA or abundance of isoalloLCA above a threshold level in a stool of the donor;
[0452] obtaining at least one bacterial isolate from the stool of the donor, wherein the bacterial isolate comprises a DNA sequence coding for an enzyme that synthesizes isoalloLCA; and
[0453] incorporating the at least one bacterial isolate into the pharmaceutical composition.
   55. The method of embodiment 54 wherein the presence or abundance of isoalloLCA is determined based on a TGR5 reporter cell assay.
   56. The method of embodiment 54 or embodiment 55, wherein the bacterial isolate is from one or more genera selected from the group consisting of Bacteroides, Parabacteroides, Butyricimonas, Odoribacter, Porphyromonas, Alistipes, and a combination thereof.
   57. A method comprising:
[0454] selecting a stool on the basis of the presence of one or more bile acid metabolizing bacteria in a stool of a donor, wherein the one or more bile acid metabolizing bacteria are capable of producing isoalloLCA;
[0455] isolating the one or more bile acid metabolizing bacteria; and
[0456] incorporating the bile acid metabolizing bacteria into a pharmaceutical composition.
   58. The method of embodiment 57, wherein the presence of one or more bile acid metabolizing bacteria in a stool of a donor is determined based on a TGR5 reporter cell assay.
   59. The method of embodiment 57, wherein the bile acid metabolizing bacteria is from one or more genera selected from the group consisting of Bacteroides, Parabacteroides, Butyricimonas, Odoribacter, Porphyromonas, Alistipes, and a combination thereof.
   60. A method of treating dysbiosis in a subject in need thereof, the method comprising: determining that a fecal microbiota of the subject comprises one or fewer bacterial clades or species capable of producing isoalloLCA; and
[0457] administering to the subject at least one bacterial species comprising a gene selected from the group consisting of a gene encoding 5β-reductase, a gene encoding 5α-reductase, a gene encoding 3β-HSDH, and a combination thereof.
   61. The method of any of embodiments 1 to 21, wherein a TGR5-based cell assay is used to (i) determine a bile acid level, (ii) determine the abundance of the bile acid-transforming bacteria, and/or (iii) select for a bile acid-transforming bacterium.
   62. A method of supplementing a microbiome of a subject with isoalloLCA, the method comprising administering to the subject a DNA sequence that encodes an enzyme that functions in the metabolic pathway that synthesizes isoalloLCA.
   63. The method of embodiment 62, wherein the enzyme is selected from the group consisting of 5β-reductase, 5α-reductase, 3β-HSDH, and a combination thereof.

### EXAMPLES

### Example 1: Subpopulations of Crohn's and UC Patients are Deficient in Secondary Bile Acids

[0458] Metagenomic sequencing and untargeted metabolomics profiling data is downloaded from public archives Franzosa, E. A., et al., Gut microbiome structure and metabolic activity in inflammatory bowel disease, Nat Microbiol. 4(2): 293-305 (2018) (“Franzosa 2018”) and processed. The cohort includes 176 subjects: 68 with Crohn's disease (CD), 53 with ulcerative colitis (UC), and 55 non-CD and non-UC controls. FIG. 1A shows that non-CD and non-UC controls have only 2% of the cohort showing low secondary bile acid expression. Of the CD and UC cohorts, 37% and 25% of subjects show low secondary bile acid expression, respectively.

[0459] FIG. 1B shows that the ratio of the secondary bile acid DCA to its corresponding primary bile acid CA (DCA:CA_log 10) and the ratio of the secondary bile acid LCA to its corresponding primary bile acid CDCA (LCA:CDCA_log 10) are lower in patients with ulcerative colitis and Crohn's disease relative to non-IBD subjects.

### Example 2: Bile Acid Profiles can be Predicted from Microbial Gene Content

[0460] Metagenomic sequencing and untargeted metabolomics profiling data is downloaded from public archives, including Franzosa 2018 and processed. The metabolomic phenotype to distinguish secondary bile acid (SBA) deficient from SBA normal patients is defined as the ratio of the secondary bile acid deoxycholic acid (DCA) to the primary bile acid cholic acid (CA)(“SBA Deficient” corresponds to a DCA:CA ratio of less than 1; “SBA Normal” corresponds to a DCA:CA ratio of 1 or more). To predict this metabolomic phenotype, bile acid-inducible operon (bai) gene abundance is measured from metagenomic data using custom software. FIG. 2 shows a correlation between secondary bile acid expression and bai gene abundance. In the cohort of subjects, patients with normal secondary bile acid levels correlates with increased bai gene abundance.

### Example 3: Presence of Particular Strain in FMT Predicts Crohn's Patient Response to FMT

[0461] The supplementary figures of Vaughn, B. P, el al., Increased Intestinal Microbial Diversity Following Fecal Microbiota Transplant for Active Crohn's Disease, Inflamm Bowel Dis 22: 2182-2190 (2016), are reviewed to determine the response to FMT. FIG. 3 shows that the repletion of bile acid transforming bacteria predicts a subject's response to FMT. Six of eight subjects show increased bai gene abundance in response to FMT treatment. Whereas of 2 of 8 subjects show a decrease or no change in Bai gene abundance.

### Example 4: FMT Restores the Ability of Microbiome to Produce Secondary Bile Acids

[0462] CDI patients are treated with FMT. The number of bile acid conversion genes are detected in the patients prior to FMT treatment and during treatment using shotgun metagenomic data. Specifically, high-throughput sequencing is used to quantify bile acid metabolism genes and pathways (e.g., bile-acid inducible operon (bai) genes required for primary-to-secondary bile acid conversion; FIG. 4A as provided by Ridlon, J. M., et al., “Isolation and Characterization of a Bile Acid Inducible 7α-dehydroxylating operon in Clostridium hylemonae TN271” Anaerobe. 16(2): 137-146 (2010)). FIG. 4B shows that on average and after a single FMT treatment, the number of bai genes detected increase from 3 to 8. Accordingly, FMT treatment restores the genetic operon required for the production of secondary bile acids.

### Example 5: Shotgun Metagenomics to Determine the Abundance of Bile-Acid Transforming Genes in a Stool Sample

[0463] Reference sequences for the bai family of enzymes from Vital, M., et al., “Diversity of Bacteria Exhibiting Bile Acid-inducible 7α-dehydroxylation Genes in the Human Gut” Comput Struct Biotechnol. J. 17:1016-1019 (2019) (“Vital 2019”) are downloaded. Each of the genome's set of 8 bai genes are clustered at the 90% amino acid sequence level. The raw shotgun reads for each sample are mapped to a representative set of bai reference sequences representing each cluster, and each read is assigned to its best hit. From the mapping results the overall abundance of bai genes in each sample is calculated across all 8 bai genes of the proportion of reads that map to that gene category. This is repeated within each 90% bai cluster to estimate the abundance of each cluster. The proportion of bai genes out of a total of 8 possible genes are also detected in each sample, and the proportion of bai genes detected from each cluster.

[0464] As shown in FIGS. 5A and 5B, the detection of a single bile acid transforming clade can be a predictor of high secondary bile acids. In FIG. 5A, “SBA Deficient” and “SBA Normal” are defined as a ratio of DCA:CA of less than 1, and 1 or more, respectively. In FIG. 5B, “low_SBA” and “high_SBA” are defined as a ratio of LCA:CDCA of less than 1, and 1 or more, respectively. In secondary bile acid deficient samples the number of bile acid transforming clades are low relative to samples with normal levels of bile acids. For FIG. 5A, only one subject having a ratio of DCA:CA of less than 1 has 2 clades with the bai gene operon, whereas 9 subjects have 1 clade, and 25 subjects have 0 clades. For FIG. 5B, 6 subjects having a ratio of LCA:CDCSA have 2 clades, 11 subjects have 1 clade and 26 samples show 0 clades. This contrasts with subjects having a ratio of secondary bile acid:primary bile acid which is normalized (greater than 1). In both FIG. 5A and FIG. 5B, all such subjects have at least one clade of bacteria with the bai gene operon, and the great majority (more than 120 for each of FIGS. 5A and 5B) have 2 or more. This figure includes patients with CD, UC and non-IBD controls.

### Example 6: 16S Sequencing to Determine the Abundance of Bile-Acid Transforming Genes in a Stool Sample

[0465] Reference sequences for the bai family of enzymes from Vital 2019 are downloaded. Each of the genome's set of 8 bai genes are clustered at the 90% amino acid sequence level. The previously published genomes from various sources used by the Vital paper are found and the 16S sequence is extracted from each genome that has bai genes. 16S reads are mapped to the set of 16S reference sequences from bai genomes. The overall abundance of taxa with bai genes and the proportion of 16S reads that map to any of the reference sequences are calculated. The abundance of each bai cluster compared to the proportion of 16S reads that map to reference sequences from genomes in that cluster are also calculated.

[0466] As shown in FIG. 6A bile acid transforming bacteria are members of relatively few numbers of clades in Firmicutes phylum. Also, the prevalence of bile acid transforming clades vary between stool from normal IBD donors and Crohn's Disease and ulcerative colitis diagnosed donors (FIG. 6B).

### Example 7: Depletion of Bile-Acid Transforming Bacteria Prevents Downstream Metabolism of Secondary Bile-Acids into an Array of Beneficial Compounds

[0467] Primary bile-acids (CA and CDCA) are normally transformed by gut microbes to secondary bile-acids (DCA and LCA). The secondary bile-acids are further metabolized to isodeoxycholic acid (IsoDCA), dehydrolithocholic acid (3-oxoLCA), isolithocholic acid (isoLCA), and IsoalloLCA. LCA protects from inflammation related loss of gastrointestinal mucosal barrier integrity. IsoDCA expands peripherally induced regulatory T cells (Tregs) by modulating farnesoid X receptor (FXR) related signaling in antigen presenting cells. 3-oxoLCA and IsoLCA suppress Th17 cell differentiation by inhibiting RAR-related orphan receptor gamma (RORyt). IsoalloLCA induces Treg expansion by increasing Forkhead Box P3 (FoxP3) expression through modulation of histone acetylation. As shown in FIG. 7, the transformation of primary bile-acids to secondary bile-acids and further metabolism is depleted in Crohn's disease patients.

### Example 8: Crohn's Disease Patients Depleted of Bile-Acid Transforming Bacteria Lack Secondary Bile-Acids

[0468] Metagenomic sequencing and untargeted metabolomics profiling data is downloaded from public archives Franzosa, E. A., et al., Gut microbiome structure and metabolic activity in inflammatory bowel disease, Nat Microbiol. 4(2): 293-305 (2018) (“Franzosa 2018”) and processed. The cohort includes 176 subjects: 68 with Crohn's disease (CD), 53 with ulcerative colitis (UC), and 55 non-CD and non-UC controls. FIG. 8 shows that non-CD and non-UC controls (collectively non-IBD) shows an increased ratio of secondary bile-acid and primary bile acids correlates with an increased abundance of bile-acid transforming bacteria, compared to Crohn's disease patients.

### Example 9: Thin Laver Chromatography Pilot Experiment

[0469] A limit of detection experiment is performed to determine the concentrations of bile acids cholic acid (CA), deoxygcholic acid (DCA), and lithocholic acid (LCA) that are detected by Thin Layer Chromatograph (TLC) in order to develop a screen of bile acid transformation during development and actual isolation experiments. The protocol is adapted from Doden et. al Applied and Env. Micro (2018). The utility of two visualization methods, phosphomolybdic acid (PMA) and sulfuric acid, is determined by preparing two plates with the same samples that are each sprayed with a different visualization agent. Visualization methods can be found in Pyka, A. J of Liquid Chromatography & Related Technologies (2008).

[0470] Materials include the following:

Bile acid stocks;

### Methanol;

[0471] hazard statements:
   [0472] highly flammable liquid and vapor
   [0473] toxic if swallowed
   [0474] toxic if in contact with skin
   [0475] toxic if inhaled
   [0476] causes damage to organs
      Microcentrifuge tubes;

### Cyclohexane;

[0477] hazard statements:
   [0478] highly flammable liquid and vapor
   [0479] causes skin irritation
   [0480] may cause drowsiness or dizziness
   [0481] may be fatal if swallowed and enters airways
   [0482] very toxic to aquatic life with long lasting effects
      Ethyl acetate;
[0483] hazard statements:
   [0484] highly flammable liquid and vapor
   [0485] causes skin irritation
   [0486] may cause drowsiness or dizziness
      Glacial acetic acid;
[0487] hazard statements:
   [0488] Corrosive, flammable liquid and vapor.
   [0489] Causes severe digestive and respiratory tract burns.
   [0490] Causes severe eye and skin burns.
   [0491] May be harmful if absorbed through the skin.
[0492] Acetic acid forms icelike solid below 17° C. (62° F.).
   TLC plates;

### Pencil;

### Ruler;

[0493] Capillary spotting tubes;
Phosphomolybdic acid;
[0494] hazard statements:
   [0495] Highly flammable liquid and vapor.
   [0496] May intensify fire; oxidizer.
   [0497] Causes severe skin burns and eye damage.
   [0498] May cause drowsiness or dizziness.
      Sulfuric acid;
[0499] hazard statements:
   [0500] may be corrosive to metals
   [0501] causes severe skin burns and eye damage
   [0502] causes serious eye damage
      Lidded glass containers;

### Forceps; and

[0503] Spray bottles.

[0504] First, 50 mM stocks of cholic acid (CA), chenodeoxycholic acid (CDCA), deoxycholic acid (DCA), and lithocholic acid (LCA) are prepared in methanol. The 50 mM stocks are diluted in methanol to 250 micromolar (μM) in a fume hood. The 250 μM stocks are then diluted 1:5 to prepared additional standards by adding methanol. The standards are 50 μM, 10 μM, and 2 μM.

[0505] Next, the hood service is covered with diaper paper. Two glass containers with lids are used to prepare 50 ml of solvent by adding 24 ml cyclohexane, 24 ml ethyl acetate, and 2 ml glacial acetic acid. Both visualization stains, phosphomolybdic acid (PMA) and sulfuric acid, are prepared. Phosphomolybdic acid (10 grams) is dissolved in 100 mL of 100% ethanol for PMA. Concentrated sulfuric acid (5 ml) is added to 95 ml of methanol.

[0506] The heat gun stand with a ring clamp is set up in the fume hood that has an accessible electrical outlet. The ring clamp is used to secure the head gun. The heat gun is positioned 10 cm from the TLC plate that is heated.

[0507] TLC plates (20×20 cm) are prepared by marking a horizontal line as the origin about 1 cm from the bottom of the plate and another horizontal line 25 mm from the top of the plate (to indicate where the solvent front travels to) with a pencil. Caution is taken to not touch the silica gel by using forceps to hold the plate in place. Twenty lanes are numbered along the origin line of the plate and spaced 1 cm apart. Using a clean capillary spotting tube each time, each BA stock is spotted on the origin line of both plates in the lane designated in a corresponding table and each spot is allowed to dry. Careful application is used so that capillary tubes only briefly touch the plate and the method is consistent between samples, spotting a similar amount of each sample. Once the spots have dried, the TLC plate is placed a glass container, covered tightly with a lid, and allowed to develop. The origin line of each spot is above the solvent and not submerged. The plate is removed from the glass container using forceps when the solvent reaches approximately 25 mm from the top of the plate. The plate is marked to shown where the solvent front stopped before it dries. The plate is sprayed with the PMA visualization solution. The plate is heated to 120° C. for 20 mins using the heat gun at the correct distance as provided above. After heating, visible spots in each lane are circled and the distance traveled from the origin is measured using a ruler.

[0508] A second plate is prepared as provided above. However, the second plate is sprayed with sulfuric acid visualization solution instead of PMA. The plate is heated to 90° C. for 20 min using the heat gun at the correct distance, as provided above. After heating, visible spots in each lane are circled and the distance traveled from the origin is measured using a ruler.

### Example 10: Selection of Bile Acids with Consensus Sequence

[0509] Donor stool is analyzed to determine the presence of bai proteins encoded by bacteria in donor stool. Examples of bai proteins that are encoded by bacteria added to a composition for treatment are provided in SEQ ID NOs: 1-252.

### Example 11: Bile Acid Reporter Assay

[0510] TGR5 is a G-protein-coupled receptor which exhibits a higher affinity for secondary bile acids than for primary bile acids. A protocol is developed for measuring TGR5 receptor activation with diverse complex bacterial media following fermentation of bacterial isolates with input substrates, i.e., various precursor bile acids and appropriate media. The TGR5 reporter cell assay uses a luminescence-based system to read out on the levels of TGR5 activation by stimulations of interest (TGR5 agonists, bile acids, bacterial supernatants, etc.). Using a 96-well-format kit (Cayman Chemicals, Item No. 601440), HEK293 cells are transfected with a complex to express TGR5 on the cell surface and a cyclic AMP response element regulating a secreted heat-resistant alkaline phosphatase reporter. Once expression occurs, HEK293 cells are treated with the stimulants of interest, allowing interaction with the TGR5 on the cell surface. This sets off a signaling cascade resulting in secretion of the heat-resistant alkaline phosphatase into the culture media, which is collected after 6-8 hours and heat-treated to inactivate any endogenous alkaline phosphatase. A substrate is then added to the supernatants collected from the HEK293 cells, resulting in luminescence upon interaction with the secreted heat-resistant alkaline phosphatase, allowing the luminescence of the supernatant to be read using a standard spectrophotometer as a metric of TGR5 activation. In this study bacterial isolates with bile acid transformation activity are incubated with primary bile acids (PBA) to allow for fermentation. Then, the supernatants from the bacterial isolates are collected and tested for the presence of secondary bile acids (SBA) and their ability to activate TGR5 using the TGR5 reporter cell assay. FIG. 10A depicts luminescence readings of cell assays testing medium containing primary bile acids chenodeoxycholic acid (CDCA) and cholic acid (CA) (PBA1 and PBA2 respectively) as controls and medium from bacterial isolate fermentations to secondary bile acids 3-oxo-lithocholic acid (3-oxo-LCA, 30LCA), isolithocholic acid (isoLCA, ILCA), lithocholic acid (LCA), deoxycholic acid (DCA), alloisolithocholic acid (alloisoLCA, AILCA, isoalloLCA, IALCA), and ursodeoxycholic acid (UDCA) (isoSBA1, isoSB2, SBA1, SBA2, isoSBA3, and SBA3 respectively). Additionally, 3-(2-chlorophenyl)-N-(4-chlorophenyl)-N,5-dimethylisoxazole-4-carboxamide was used as a positive control. FIG. 10B depicts luminescence readings from four bacterial isolates (1: Clostridium scindens (strain 1); 2: Clostridium scindens (strain 2); 3: Clostridium hylemonae; control: Bacteroides fragilis) incubated with medium only or with primary bile acids cholic acid (CA) and chenodeoxycholic acid (CDCA) (PBA1 and PBA2 respectively).

### Example 12: isoalloLCA as a Biomarker for Donor Selection and Patient Response

[0511] Metagenomic sequencing and untargeted metabolomics profiling data is downloaded from public archives including Franzosa, E. A., et al., Gut microbiome structure and metabolic activity in inflammatory bowel disease, Nat Microbiol. 4(2): 293-305 (2018) (“Franzosa 2018”) and Human Microbiome Project (HMP2), and processed. Data from 220 analyzed samples from the Franzosa 2018 archive is used, which includes data from 56 non-inflammatory bowel disease (IBD) samples, 76 ulcerative colitis (UC) samples, and 88 Crohn's disease (CD) samples. Additionally, metagenomic data from 130 analyzed samples from the HMP2 archive is used, which includes data from 27 non-LBD samples, 38 UC samples, and 65 CD samples.

[0512] IsoalloLCA is a secondary bile acid which induces Treg expansion by increasing Forkhead Box P3 (FoxP3) expression through modulation of histone acetylation. Samples from subjects with CD and UC show secondary bile acid deficiency. At least 18 distinct isoalloLCA-producing bacterial species exist. See Li, Wei et al. “A bacterial bile acid metabolite modulates Treg activity through the nuclear hormone receptor NR4A1.” Cell host & microbe vol. 29, 9 (2021): 1366-1377; Sato, Yuko et al. “Novel bile acid biosynthetic pathways are enriched in the microbiome of centenarians.” Nature vol. 599, 7885 (2021): 458-464. The metagenomic data is analyzed for isoalloLCA sequences, and the abundance of isoalloLCA-producing bacterial species in non-IBD, UC, and CD samples is determined (data not shown). Additionally, an analysis of the abundance of characterized isoalloLCA-producing genes (5α-reductase, 5β-reductase, and 3β-HSDH) in non-IBD, UC, and CD samples where patients had been further classified as dysbiotic or normal, reveals that isoalloLCA-producing genes are differentially present in the microbiome of dysbiotic versus normal states regardless of the non-IBD, UC, or CD diagnosis (FIG. 11). These studies indicate that isoalloLCA can be used as a marker of dysbiosis, allowing for the selection of a subject in need of supplementation with bile acid transforming bacteria, particularly isoalloLCA-producing bacteria. These studies also indicate that isoalloLCA can be used as a marker to identify suitable stool donors whose microbiomes contain beneficial isoalloLCA-producing bacteria.

[0513] A variety of further modifications and improvements in and to the compositions and methods of the present disclosure will be apparent to those skilled in the art.

### Example 13: Bile Acid Stability Studies

[0514] Bile acid stability is investigated using clinically relevant raw stool sample collection procedures where stool samples are held for long times during shipment to a central laboratory for intake and freezer storage. Three stool donations are collected, and each is homogenized and split into two subsamples. One subsample is immediately placed in storage at 4° C. The other subsample is spiked with primary bile acids CA and CDCA prior to storage at 4° C. to better assess primary bile acid stability. Samples are collected from each subsample at 0, 6, 24, 48, and 72 hours to determine stability of bile acids during storage. At each time point 0.5 g aliquots are collected and frozen until shipment for quantitative bile acid metabolomics analysis. Large reductions in primary bile acid concentrations are observed with longer storage. Smaller relative changes in secondary bile acids are observed, suggesting greater stability of these metabolites. While an increase in secondary bile acids is observed in samples receiving primary bile acid spikes, higher concentration of secondary bile acids compared to primary bile acids in these stool samples minimizes the impact of conversion of primary bile acids on measured secondary bile acid concentrations. This study reveals that primary bile acid stability over timespans that are realistic for clinical sample collection is poor and alternate sampling methods to stabilize primary bile acid concentrations are required. While raw stool collection may still be reliable for revealing large, order of magnitude changes in primary bile acids that are not observed in this study, stabilizing at home collection methods may offer a potential solution to storage of raw stool samples.

The application's sequence listing, which the Patent Office published only in electronic form, follows.

SEQUENCE LISTING (252 sequences)

SEQ ID NO: 1 - protein, 255 aa, Unknown
  Description of Unknown: BaiA Pasolli 15265 XieH 2016 YSZC12003 37135 bin.19.fa ALFGHMFB 00320 sequence
MFENEFKGKVVLVTGGSRGIGFAAVKGFLAGGAKVYFLSHYEETGAKALAALKEINPDYEVMTKAIDLCDYKAVQELYKEIIAKWGRLDVLVNNAGTDNSTWLTKLKQSEWDAVCNLNMKGPYTMMKYAIPHLIKTKGCIVNTASVAGVYGCPTGLPYPASKAALIAMTKSVAYSFADRGVRVNAVAPGVVNTDMVANMPQFAKDSVGDTIPMKRFAEPEDIANGILFLSSSAASYVTGVCLQIDGGYRPNNLPK

SEQ ID NO: 2 - protein, 257 aa, Unknown
  Description of Unknown: BaiA Pasolli 15188 KarlssonFH 2013 S54 bin.27.fa BBGPADBL 00027 sequence
MFENEFNGKVVLVTGGSRGIGFATVKAFLAAGAKVCFVSHYEETGAKAMEQLMAINPNYEVIREVMDLSNPDFKAIQELYKKIEDKWGRLDVLFNNAGTDSSTWLTKLKISEWDSVCNLNMKTPFLMSKYAIPYLTKTKGCIVSTASVAGVYGTPTGLPYPATKAAVIAMTKSMSYSFADKGVRVNCVAPGVIATDLVAGLPQFAKDSIGDTIPMKKFGEPEDIANAVLFLSSSAASYITGVCLQVDGGYRPNNQPK

SEQ ID NO: 3 - protein, 250 aa, Unknown
  Description of Unknown: BaiA Pasolli 15210 FengQ 2015 SID531416 bin.49.fa CEDOFBAM 00065 sequence
MELVKDKVVFITGGTRGIGFAAAKLFIQNGAHVAIAGHCQETVDAALAKLKELYPDVDVLGLHPTLTSRQEMLDAVGQVVAKWGRIDVMINNAGVTHATVFSKIQEGEFEHMFDVNVEGVYNGAWAAYQYMKANNAGVIINTASVTGLFGSTSGVGYPASKAAVVGFTHELGRELIRRNIRVVAVAPGVVNTDMTTANMDPVIKEQYLKHLPMKRMLEPEEIANVYMFLASDLASGITATTVSVDGAYRP

SEQ ID NO: 4 - protein, 250 aa, Unknown
  Description of Unknown: BaiA Pasolli 15209 RaymondF 2016 P21E7 bin.22.fa DDJCLBHB 00371 sequence
MELVKDKVVFITGGTRGIGFAAAKKFIENGAHVAIAGHAQETVDAALAKLKELYPDVDVLGLHPTLTSRQEMLDAVGQVVAKWGRIDVMINNAGVTHSTVFSKIQEGEFEHMFDVNVEGVYNGAWAAYQYMKANNAGVIINTASVTGLFGSTSGVGYPASKAAVVGFTHELGRELVRRNIRVVAVAPGVVNTDMTNANMDPVIKEQYLKYLPMKRMLEPEEIANVYLFLASDLASGITATTVSVDGAYRP

SEQ ID NO: 5 - protein, 255 aa, Unknown
  Description of Unknown: BaiA Pasolli 15265 SchirmerM 2016 G89065 bin.22.fa EBDJMKCO 00059 sequence
MFENEFKGKVVLVTGGSRGIGFATVKGFLAAGAKVYFLSHYEETGAKALAALKEINPDYEVMTKAIDLCDYKAVQELYKEIIAKWGRLDVLVNNAGTDNSTWLSKLKQSEWDAVCNLNMKAPFTMTKYAIPHLVKTKGCIVNTASVAGVYGCPTGLPYPATKAALIAMTKSVAYSYADKGVRVNAVAPGVVNTDMVANMPQFAKDSVGDTIPMKRFAEPEDIANGILFLSSSAASYVTGVCLQIDGGYRPNNLPK

SEQ ID NO: 6 - protein, 250 aa, Unknown
  Description of Unknown: BaiA Pasolli 15211 LouisS 2016 AS60 3 bin.9.fa GHGEBOMP 00333 sequence
MDLVKGKIVFITGGTRGIGFAAAKKFIENGAHVAIAGHCQETVDAALAKLKELYPDEDVLGMCPNLTSRQEMLDAVGKVVAKWGRIDVMINNAGVTHATVFSKIQEGEFEHMFEVNVEGVYNGAWAAYQYMKANNAGVIINTASVTGLFGSTSGVGYPASKAAVVGFTHELGRELIRRNIRVVAVAPGVVNTDMTTANMDPTIKEQYLKHLPMKRMLEPEEIANVYMFLASDLASGITATTVSVDGAYRP

SEQ ID NO: 7 - protein, 250 aa, Unknown
  Description of Unknown: BaiA Pasolli 15202 Bengtsson-PalmeJ 2015 TRAVELRES21 bin.108.fa KLDDHOPD 00149 sequence
MQLVKDKVVFITGGTRGIGFAAAKIFIENGAHVAIAGHCQETVDHALAQLKELYPDVEVLGMHPDLTSRQEMLDAVGQVVAKWGRIDVMINNAGITHDSVFSRVAEGEFEHMFEVNVFGAYNGTWAAYQYMKNNNSGVIISTASVTGIYGSLSGVAYPASKAAIVGMVHELGRELVRRNIRVVGVAPGVVNTDMTNANMNPAIKETALAHLPMKRMLEPEEIANVYLFLASDLASGITATTISVDGAYRP

SEQ ID NO: 8 - protein, 255 aa, Unknown
  Description of Unknown: BaiA Pasolli 15265 Obregon-TitoAJ 2015 SM11 bin.2.fa LFPPKIPJ 00384 sequence
MFENEFKGKVVLVTGGSRGIGFATVKGFLAAGAKVYFLSHYEETGAKALAALKEINPDYEVMTKAIDLCDYKAVQELYKEIEAKWGRLDVLVNNAGTDSSTWITKLKQSEWDAVCDLNMKGPFTMCKYAVPYLVKTKGCIVNTASVAGVYGSPTGLPYPTSKAGLIAMTKSIAYSFANKGVRVNAVAPGVVATDLVASLPKFAKDSIGDTIPLKRFAEPEEIANGIMFLSSSAASYVTGVCLQIDGGYRPSNLTT

SEQ ID NO: 9 - protein, 255 aa, Unknown
  Description of Unknown: BaiA Pasolli 15002 LiJ 2014 V1.FI04 bin.94.fa MJMNNJHI 01033 sequence
MFENEFKGKVVLVTGGSRGIGFGIVKSFLAAGAKVYFLSHYVETGAKALAALKEINPDYEVMTKAIDLCDYKAAQELYAEIEEKWGRLDVLVNNAGVDSNTPVQKLKQSEWDSVMNVNVKAIFNMSKYAIKLLKKTKGCIVNTASVAGIFGSGVGCPYPTSKGAVISMTKSLAWELAYSGVRVNAVAPGVIETDLLSTVPEFAKKNLMSGIPLRRIGKPEDIANGVLFLASSAASYITGVTLNVDGGYVPANVAN

SEQ ID NO: 10 - protein, 253 aa, Unknown
  Description of Unknown: BaiA Pasolli 15002 LiJ 2014 V1.FI04 bin.94.fa MJMNNJHI 01041 sequence
MYEELKGKVAVISGGSRGIGFAAVKKFLAEGVKVCFLSHYEETGEKAMAALKEINPDYEVMRRVIDLCDYKAVQQLFSDVEAKWGRIDILINNAGIDSSTPLNQLKQAEWNEVMDLNTKSIFTMSKYAIKYLKKHKGCVINTASVAGVYGSAAGLPYPASKAAVIGMTQSLAWTFAPLGVRVNAVAPGVVNTDLVANLPDFAAKTITGTIPLSRFGEPEDIANVMLFLASDSAAYITGDTIHADGGYRPANTF

SEQ ID NO: 11 - protein, 254 aa, Unknown
  Description of Unknown: BaiA Pasolli 15004 FengQ 2015 SID31866 bin.65.fa NCFGPKLH 00813 sequence
MFEKAFEGKVVIVTGGSRGIGFATVKSFLAAGAKVCFLSHYVETGAKALAALKEINPDYEVFTKAIDLCDYKAAQDLFAEVEAKWGRVDVLVNNAGVTCDTPLAKLKQAEWDEVININQKAVFNMSKYAIKYLKKTKGCVVNTASVNGIFGTPAGLPYPASKAAVIGMTKGLAWTFAPLGVRCNAVAPGVVNTDMLAGTSEPMKKTLAGTIPLKRIGEPEDLANAILFLASDAASYITGQTLQVDGGFRPVNAY

SEQ ID NO: 12 - protein, 262 aa, Unknown
  Description of Unknown: BaiA Pasolli 15004 FengQ 2015 SID31866 bin.65.fa NCFGPKLH 00817 sequence
MSGLPGEGCYMMLLSDKVAILTGVNSGIGRKAAEIFAKNGAKVFGADIRTDKMDELRAVFKACGSEFEGCCCDVRKAEDVKAVFSRAVERFGRIDIVVNIAGISCDKPISRISDEDFSRIMDINVRGVFNFCKYAVPYFKKQKHGVIINTSSITGIYGSGMGCPYPASKAAIMGMTKTLAYELAPWNIRVNCVAPGVVNTEMVAALGERARKTFERSIPLRRMGEPEDIADAIVFMASDMARYITGTTLCVDGGYRPSTVNP

SEQ ID NO: 13 - protein, 256 aa, Unknown
  Description of Unknown: BaiA Pasolli 15005 LiJ 2014 MH0358 bin.56.fa NPCPOAJM 00308 sequence
MFENAFNGKVAIVTGGSRGIGFAAVKGFLAAGAKVCIVSHFEETAAKAVEELKAINPDYEVMTCAMDLSKPDFKAMQALVADVAAKWGRIDVLVNNAGHDSSTPFGNLKSDEWDNLVNLNMKSIYMLTKYARKELIKTKGCVVNTASVNGIFGTPAGLPYPATKAGVIGMTKSLAWTFAPLGVRVNAVAPGVVDTDLLAAVPPAMKKTMAGTIPLKRIGVAEDIANAILFLSSDAASYITGQTIQVDGGFRPVNVY

SEQ ID NO: 14 - protein, 251 aa, Unknown
  Description of Unknown: BaiA Pasolli 15005 LiJ 2014 MH0358 bin.56.fa NPCPOAJM 00314 sequence
MLLSGQVAVITGVNSGIGRKTAEIFAEQGANIVGVDIRTDRMEELQKQVEAYGAKFLGCQCDVRSEEDVKACLSKAFKTFGAIDIMVNIAGVSSDRPITRTTGEEYQRVMDINVRGTFNFCKNAAVYFKKQKHGVIINTASVNGIYGAGMGCPYSASKGAIISLTKSLAIELAPWHVRANAVAPGVVNTEMVAVLGEKERQCFVDSIPLKRMGEAEDISRAMLFLASDWASYITGTIVNVDGGYRPPTINM

SEQ ID NO: 15 - protein, 255 aa, Unknown
  Description of Unknown: BaiA Pasolli 15265 LiuW 2016 SRR3992994 bin.12.fa OBMFBIGE 00760 sequence
MFENEFKGKVVLVTGGSRGIGFAAVKGFLAAGAKVYFLSHYEETGAKALAALKEINPDYEVMTKAIDLCDYKAVQELYKEIIAKWGRLDVLVNNAGTDNSTWLTRLKQSEWDAVCNLNMKAPYTMMKYAIPHLVKTKGCIVNTASVAGVYGCPTGLPYPASKAALIAMTKSVAYSFANKGVRVNAVAPGVVNTDMVANMPQFAKDSVGDTIPMKRFAEPEDIANGILFLSSSAASYVTGVCLQIDGGYRPNNLPK

SEQ ID NO: 16 - protein, 255 aa, Unknown
  Description of Unknown: BaiA Pasolli 4621 Obregon-TitoAJ 2015 NO11 bin.28.fa ODBMCAMJ 01959 sequence
MFENEFEGKVVLVTGGTTGIGYATVKSYLKAGAKVYFLGKEGEDVSAQLEELKSINPNYEFKHKAINLCDYKAAQELYAEIEEMWGKLDILVNNAGVDSSLPIHKMKQAQWDYVMDTNIKSMFNMTKYAIKLLKKTKGCIVNTASVAGIYGSGCGCPYPVSKGGVIAFTQSMAWEQAYAGIRCNAVAPGVINTKLLDTVPPFAKKSLAQGIPLRHIGEPQVIADAILFLSSSAASYITGVTLPVDGGYRPANVAN

SEQ ID NO: 17 - protein, 253 aa, Unknown
  Description of Unknown: BaiA Pasolli 15003 XieH 2016 YSZC12003 35390 bin.5.fa PIKIEFGP 00579 sequence
MYEELKGKVAVISGGSRGIGFAAVKKFLAEGVKVCFLSHYEETGEKAMAALKEINPDYEVMRRVIDLCDYKAVQQLFSDVEAKWGRIDILINNAGKDSSTPLNQLKQAEWNEIMDLNTKSIYTMSKYAIKYLKKHKGCIINTASVAGVYGSAAGLPYPTSKAAVIGMTQSLAWTFAPLGVRVNAVAPGVINTDLVANLPDFAAKTITGTIPLSRFGEPEDIANVMLFLASDSAAYITGDTIHADGGYRPANTF

SEQ ID NO: 18 - protein, 255 aa, Unknown
  Description of Unknown: BaiA Pasolli 15003 XieH 2016 YSZC12003 35390 bin.5.fa PIKIEFGP 00583 sequence
MFENEFKGKVVLVTGGSRGIGFGIVKSFLAAGAKVYFLSHYVETGAKALAALKEINPDYEVMTKAIDLCDYKAAQELYAEIEEKWGRLDVLVNNAGADSSTPIQKLKQSEWDDIMNVNVKAIFNMSKYAIKLLKKTKGCIINTASVAGIFGSGVGCPYPTSKGGVISMTKSLAWELAYHGIRVNAVAPGVIETDLLATVPEFAKKNLMSGIPLRRIGKPEDIANGVLFLASSAASYVTGVTLNVDGGYVPANVAN

SEQ ID NO: 19 - protein, 250 aa, Clostridium hiranonis
MNLVQDKIVIITGGTSGIGLCAAKIFMDNGATVSIFGKTQEEVDAAKAELKETHPDKEVLGFAPDLTNRDEVMAAVGAVAEKYGRLDVMINNAGVTSSNVFSRVSPEEFKYLMDINVTGVFNGAWAAYQCMKGRKEGVIINTASVTGIHGSLSGVGYPTSKSAVVGFTQALGREIIRKNIRVVGVAPGVVNTPMVGNIPDEILDGYLSSFPMKRMLEPEEIANTYLFLASDLASGITATTVSVDGAYRPS

SEQ ID NO: 20 - protein, 255 aa, Unknown
  Description of Unknown: BaiA Pasolli 15265 ERR1620327 bin.47 BPCKCDAK 00028 sequence
MFENEFKGKVVLVTGGSRGIGFAAVKGFLAGGAKVYFLSHYEETGAKALAALKEINPDYEVMTKAIDLCDYKAVQDLYKEIIAKWGRLDVLVNNAGTDNSTWLTKLKQSEWDAVCNLNMKGPYTMMKYAIPHLIKTKGCIVNTASVAGVYGCPTGLPYPASKAALIAMTKSVAYSFADRGVRVNAVAPGVVNTDMVANMPQFAKDSVGDTIPMKRFAEPEDIANGILFLSSSAASYVTGVCLQIDGGYRPNNLPK

SEQ ID NO: 21 - protein, 255 aa, Eubacterium sp.
MFEKEFEGKVVLVTGGSTGIGYATVKSFLASGAKVYFLGKPGEDLTKQTEELKSINPDYDFASNTIDLCDYKAAQALYAEIEEKWGRLDVLVNNAGVDSSLPIHKMKQSQWDYVMNVNLKGMFNLTKYAIKYLKKTKGCIVNTASVAGIYGAGCGSPYPASKGGVIAFTKSMAWEQAYAGIRCNAVAPGVIDTNLLATVPPFAKKNIAKQIPLGHIGEPQEIANAILFLSSSAAQYITGITLQVDGGYVPHNTVG

SEQ ID NO: 22 - protein, 255 aa, Unknown
  Description of Unknown: BaiA Pasolli 15265 ERR1018244 bin.34 GIGKKEJC 00809 sequence
MFENEFKGKVVLVTGGSRGIGFAAVKGFLAGGAKVYFLSHYEETGAKALAALKEINPDYEVMTKAIDLCDYKAVQELYKEIIAKWGRLDVLVNNAGTDNSTWLTKLKQSEWDAVCNLNMKGPYTMMKYAIPHLTKTKGCIVNTASVAGVYGCPTGLPYPASKAGLIAMTKSVAYSFADRGVRVNAVAPGVVNTDMVANMPQFAKDSVGDTIPMKRFAEPEDIANGILFLSSSAASYVTGVCLQIDGGYRPNNLPK

SEQ ID NO: 23 - protein, 255 aa, Unknown
  Description of Unknown: BaiA Pasolli 15265 ERR1578621 bin.18 HPOHBHHF 00904 sequence
MFENEFKGKVVLVTGGSRGIGFAAVKGFLAGGAKVYFLSHYEETGAKALATLKEINPDYEVMTKAIDLCDYKAVQELYKEIIAKWGRLDVLVNNAGTDNSTWLTKLKQSEWDAVCNLNMKGPYTMMKYAIPHLIKTKGCIVNTASVAGVYGCPTGLPYPASKAALIAMTKSVAYSFADRGVRVNAVAPGVVNTDMVANMPQFAKDSVGDTIPMKRFAEPEDIANGILFLSSSAASYVTGVCLQIDGGYRPNNLPK

SEQ ID NO: 24 - protein, 256 aa, Unknown; identical to SEQ ID NO: 13
  Description of Unknown: BaiA Pasolli 15005 ERR414305 bin.35 IEHPGPHH 00304 sequence

SEQ ID NO: 25 - protein, 255 aa, Unknown; identical to SEQ ID NO: 16
  Description of Unknown: BaiA Pasolli 4621 SRR2726241 bin.48 LDBMBPGB 00668 sequence

SEQ ID NO: 26 - protein, 250 aa, Unknown; identical to SEQ ID NO: 7
  Description of Unknown: BaiA Pasolli 15202 ERR1913015 bin.15 PGCAENMN 00632 sequence

SEQ ID NO: 27 - protein, 506 aa, Unknown
  Description of Unknown: BaiB Pasolli 15265 XieH 2016 YSZC12003 37135 bin.19.fa ALFGHMFB 00321 sequence
MRTQHFNIFNTGTESFFTPGTQLANIARVKPDAPAVIYVSPENKETVMTWLELHELSNRIAWYLLDQGIGPGKSVLAALPNIPTHIALAFGIWKTGACYVPVSNRAPQRNLMEICTCVSPALVITNRKKPDGYPSLSTAELKTLCAQCSAQLPPDVLAIPNLANCSGGTTGKTKVIEQDMPAGESDEGLRTWFSVSGMRFEMRQLLAGPLFHGAPHSAAFNGLYCGNTLVMPAKLDAETIVRLIKKYRIEYVQMVPTLMQRISRMPGFRKEDLASIEVLCHTGGVCSQDLKREWLEIIPPERLYELYAMTECIGMTSIRGDEWLRHPGSVGKMHCGRVAIRDEDGRELPHGEIGEIFMSWGDNSPRVTYKNMPPLPVDSEGFRSVGDMGYVDADGYLYFADRRSDMIVTGGENVFAAEVEMVLKKHPKVVDAVVIGLPDPDWGHRIHAIVETNAPLGSKELIRFALNYLPPYKIPKSIEFTDHIPVNENGKIVRSKLIEESLVKGY

SEQ ID NO: 28 - protein, 506 aa, Unknown
  Description of Unknown: BaiB Pasolli 15188 KarlssonFH 2013 S54 bin.27.fa BBGPADBL 00028 sequence
MSVKHFNFFNTAEESFFTPGRQIANIAKVKPDAPAIIYISPENTETVMTWRELEILSNRIAWYLLDIGIGPGKSVIVALPNIPTHIAIALAIWKTGACYVPVSNRTPQRNMAEICECVVPSLVITNRKKPAGYESLTSGELKELSGDKSDEMPPDILAIPNLANCSGGTTGKTKVIEQCMPAGESDESLKFWFEMTGMRFEMRQLLAGPLFHGAPHSAAFNGLYSGNTLVMPASLDAQTIVDCIKKYRIQFVQMVPTLMQRIIKMPGFSKDDLESLEVLCHTGGVCSKDLKREWLKVLEPEKLYELYSMTECIGMTHIRGDEWLAHPGSVGKISGGSISIRDDNGNELPVGETGNIFMAWSGDAPRVRYKNVPPIEADENGYRSVGDMGYLDADGYLYFADRRSDMIVSGGENVFAAEVEEVLKKHKKVNEAVVIGLPDKEWGHRIHALVETSEPTSSKELIKFALDYLPPYKIPKSFEFLEEIPRNDSGKFVRPKLIEESLKKGY

SEQ ID NO: 29 - protein, 508 aa, Unknown
  Description of Unknown: BaiB Pasolli 15210 FengQ 2015 SID531416 bin.49.fa CEDOFBAM 00061 sequence
MAVNVRLNRYNLGAGDFVTPGMQLHYVAEAKPDEPAVIRIHSDGSEERISWSELDKLTNQMAWMLMDKGVRPDSTVLVSYPNSIEHICANYAIWKTGACYMPVSCRTSAEELLELQTLLSPAAALTDIDVDEKVFKCGMDELREACSGYPEDMTPDVISNPNIINASGGSTGKPKLIRQKIPCGHSDGSLKSWFDVSGMDFDQIQLLAGPLFHGAPHIAAMNGLFTGGTLILPPSLCPDILVECVEKYKVQFIQTVPTLMHRIIKMAGLKKESFASLQALCHTGGVCSEWLKRAWLEILPPEKIYEMYSMTEVIGMCAIRGDEWLRHPGSVGLPQYGSKISIRDCDGKELGPYEVGNIYMSPPAGFFYTEYINERPLNTLDDNFRSVGDMGYVDSEGYLYFADRRSDMIVTGGENVFAAEVENAMLRDPHVLDAVVVGIPDAEWGRRLHAVLETDGQIDAAELKSFLKQFLLPYKIPKTYEFVKRIKRKENGKIARDEVLNDCIARGV

SEQ ID NO: 30 - protein, 508 aa, Unknown
  Description of Unknown: BaiB Pasolli 15209 RaymondF 2016 P21E7 bin.22.fa DDJCLBHB 00367 sequence
MNETVVLNKYNYSDSSFVTPGMQLHSIAQSKPDDVAAIVVHKDWREEKISWSELDKFSSRLAWMLIDKGVGPKSTVLVSYPNNIEHIVANFAIWKTGACYMPISWRTPPEELIELQQLLSPAAALTDIDVTEEVFKCGMNELADACSGYSDEMPPDTLANPNIINASGGSTGKPKLIRQNIPSGHSDVSLSSWFEVSGMRMDQTQLLCGPLFHGAPHIAAMNGLFAGGTLVLPQSLCPDFLTECIEKYGIEFIQTVPTLMYRILKMPGLKKETFSSLEALCHTGGVCSEWLKRAWLKLISPEKLYEMYSMTEVIGMCAIRGDEWLQHPGSVGKAKYGSEISIRDAEGHELAPFEIGNIYMSPPAGHFYTEYINEKPLNIEGDNFRSVGDMGYVDNEGYLYFADRRCDMIVSGGENVFSAEVENAMLRNRHVLDAVVVGIPDQEWGRRIHAVLETDGEIDVPALKGFLKQYLVPYKIPKSFEFVKRIPRLDNGKVAREAILKDCIERGI

SEQ ID NO: 31 - protein, 506 aa, Unknown
  Description of Unknown: BaiB Pasolli 15265 SchirmerM 2016 G89065 bin.22.fa EBDJMKCO 00058 sequence
MRTQHFNIFNTGTESFFTPGTQLANIARMKPDAPAVIYVSPENKESVMTWRELHELSNRIAWYLLDQGIGPGKSVLAALPNIPTHIALAFGIWKTGACYVPVSNRAPQRNLMEICACVSPALVITNRKKPDGYPGLSTAELRTLCAGCPADMPPDVLAIPNLANCSGGTTGKTKVIEQDMPAGESDEGLKTWFAVSGMRFEMRQLLAGPLFHGAPHSAAFNGLYCGNTLVMPAKLDAETIVRLIKKYRIEYVQMVPTLMQRISRMPGFRKEDLASIEVLCHTGGVCSQDLKREWLEIIPPERLYEMYAMTECIGMTSIRGDEWLRHPGSVGKMHCGRVSIRGEDGHELPTGEIGEIFMSWGDNSPRVRYKNIPPIPTDSAGFRSVGDMGYVDAEGYLYFADRRSDMIVTGGENVFAAEVEMVLKKHPKVVDAVVIGLPDPDWGHRIHAIVETNGSVGNKGLIRFALNYLPPYKIPKSIEFVDHIPVNENGKVVRSKLVEESLAKGY

SEQ ID NO: 32 - protein, 508 aa, Unknown
  Description of Unknown: BaiB Pasolli 15211 LouisS 2016 AS60 3 bin.9.fa GHGEBOMP 00336 sequence
MPESVRFNRFNKGTEDFVTPGLQLEYVADAKPDGTAIVEIDKQGKEIKISWDGLRKLSNRIAWLLIDKGIDSDSTVIVTWPNNILHVAAMLAIWKCGACYVPIPSKTTIAELDGVLDTLHPKLLLTDLELDEDADAISGARLEELSAGFAETLPPDVVSNPNIITLSGGSTGRPKLIRQNLAAGHTDDTLRGWCEMIGMGFEMMQMLLGPIFHGAPHSCLMNGLFMGNTIIMPHNLCPDSIIKLIKEFGVEYMQMVPTLMHRIVKEPGVSAADFATIKAFSHTGGVCSEWLKREWFKLIPPERVYEMYSQTEVIGLCCIRGDQWLKHPGSVGRPVGGGKISIRDENGHEVPTGTVGEIFMTPPADFFYTEYINAPPIELMPDGYRSVGDMGYVDEDGYLYFSDRRSDIIVTGGENVFAVEVENAIMQYPNVLDAVVVGLPDPEWGRRIHAVIESREKIDIADLKSFLKTRLTPYKIPKTYELVPSIRHEGNGKIQRMRIMKECIARGV

SEQ ID NO: 33 - protein, 508 aa, Unknown
  Description of Unknown: BaiB Pasolli 15265 Obregon-TitoAJ 2015 SM11 bin.2.fa LFPPKIPJ 00383 sequence
MGANTEHFNYFNTSEESFFTPGRQLADIAHVKPDAPAIIYISPENTESVTSWHELETLSSRIAWYLIGQGIGPGKSVLSALPNIPTHIALAFGIWKTGACYVPVSNRVPQRNMAEICECVAPSLVITNRKKPEGYPSLTTAELRELCAPMSDEMPPDILAIPNLANCSGGTTGKTKVIQQDMPAGESDEGLKTWFTVSGMSFEMRQLLAGPLFHGAPHSAAFNGLYCGNTLVMPASLDAETIVRCIKKYEIEYVQMVPTLMQRIIRMPGFNKDDLKSLKVLCHTGGVCSADLKRQWLDILGPEKLYEMYSMTECIGMTHIRGDEWLRHPGSVGRILCGKLSIRGDDGQELPTGEVGNIYMSWGANSPKVEYKNIAPIECDENGFKSVGDMGYVDDEGYLYFADRRSDMIVTGGENVFAAEVETALMKHPAVVDAVVVGLPDKDWGHRIHAIVETSAPVTQKELIRFALNYLTPYKLPKSIDFVDHIPRNESGKVVRSQLVEESLKKGF

SEQ ID NO: 34 - protein, 506 aa, Unknown
  Description of Unknown: BaiB Pasolli 15002 LiJ 2014 V1.FI04 bin.94.fa MJMNNJHI 01032 sequence
MSVKHFNIFNTSDEESFFTPGKQLARIAAVKPDVPAIIYISPENRETVMTWHELEVLSNRIAWYLKDQGVGSGKSVIVALGNTPTHIALAFGIWKVGGCYVPISSRVPQKNMAEICECISPVLVVTNRKKPAGYTSLSSTELKQLSAGYSDEMPPDTVAIPNLANCSGGTTGKTKVIQQNMPAGESDEGLQAWFYMSGMNFEMRQLLAGPLFHGAPHSAAFDGLYCGNTLIMPATFDAQLIVDLIKKYQVEYVQMVPTLMQRIVKLPGFSKDDMKSIKALCHTGGICSKDLKYQWLDIIPPDRVYEMYSMTECIGMTNIRGDEWLKHPGSVGKMLDGTISIRDEDGKELPAGEIGIIYMCWPNSPNVEYVNVAPIEKDTSGYRTVGDMGYVDEDGYLYFADRRSDMIVTGGENVFAAEVEAVLKKHKKVVDAVVIGLPDSEWGHRIHAIVEASEPVTDKELIKFSLNFLPPYKIPKSFEFVDSIPRNESGKVVRSVLIQESLKKGY

SEQ ID NO: 35 - protein, 506 aa, Unknown
  Description of Unknown: BaiB Pasolli 15004 FengQ 2015 SID31866 bin.65.fa NCFGPKLH 00812 sequence
MSAEHFNIFNKAEESCFTAGRQLANIAAVKPDAPAIVYISPEGNESVTSWRELESLSNRMAWYLMDQGIGPGSFVIAALTNTPSHVALAFAIWKTGACYVPVSNRTPKRNMLEICGCVSPALVVTNRSQPAGYKSISTAELKKLCAGYSGKMPPDIQAVPNLANCSGGTTGKTKVIQQNMPAGESDEGMRAWFASSGMDFEMRQLLAGPLFHGAPHTAAFNGLYAGNTLVMPASLKAETVLHLIKKYQIEYVQMVPTLMQRIIKLPEFRKEDLSSLKALCHTGGICSRDLKLQWMEILAPEKIYEIYAMTECVGMTSIRGDEWLRHPGSVGKMAAGAISIRDEEGRELPKGETGEIFMSWGDRSPNVTYKNVPPLEADEKGFRSVGDMGYVDAEGYLYFADRRSDMIVTGGENVFAAEVETVLKKHRNVVDAVVVGLPDKEWGHRIHALVETARPVTEKELIKFSLDYLPPYKIPKSFEFLPEIPRNESGKVVRSQLIEESLAKGF

SEQ ID NO: 36 - protein, 505 aa, Unknown
  Description of Unknown: BaiB Pasolli 15005 LiJ 2014 MH0358 bin.56.fa NPCPOAJM 00307 sequence
MSARHFNIFNNGSRSFCTPGAQLANVARVKPDEAALIYISPENNESVMTWKELEALSNRMAWYFLDKGIKPGKSVLVALGNIPSHIAIAFAIWKAGGCYVPVSNRAPQKNMLEICECVEPDIVITNRKKPDGYFGLSTNELKELCAGYSAEMPPDILAIPNLANCSGGTSGKTKVIQQNMPAGLDDNGLEHWFTVSGMHFEMRQLLAGPLFHGAPHSAAFDGLFAGNTLIMPSSFDASLVVDLIKKYKVEYVQMVPTLMQRIIKLPGFTKDDFASVEVLCHTGGVCSADLKEQWLEIVSPEKLYEIYSMTECIGMTSIRGDEWIEHRGSVGRMPGGSISIRDEDGKELPTGEVGGIYMSWGANSPTVEYKNIAPLEADSEGFRSVGDMGYLDEDGYLYFADRRSDMIVTGGENVFAAEVEAVLKKNANVIDAVVVGLPDAEWGHRIHAIVETSAPVTSKELIKMALNYLPPYKIPKSFEFEPIPRNESGKVTRSALIEESLKKGF

SEQ ID NO: 37 - protein, 506 aa, Unknown
  Description of Unknown: BaiB Pasolli 15265 LiuW 2016 SRR3992994 bin.12.fa OBMFBIGE 00759 sequence
MRTQHFNIFNTGTESFFTPGTQLANIAAVKPDAPAVIYVSPENKESVMTWRELHELSNRIAWYLLGQGVGPGKSVLAALPNIPTHIALAFGIWKTGACYVPVSNRAPQRNLMEICACVSPALVITNRKKPDGYPGLSTAELRTLCANCPADMPPDVLAIPNLANCSGGTTGKTKVIEQDMPAGESDEGLRTWFAVSGMRFEMRQLLAGPLFHGAPHSAAFNGLYCGNTLIMPAKLDAETIVRLIKKYRIEYVQMVPTLMQRISRMPGFRKEDLASLEVLCHTGGVCSQDLKREWLQIIPPERLYEMYAMTECIGMTSIRGDEWLRHPGSVGKMHCGRVSIRDEDGHELPTGEIGEIFMSWGDNSPRVIYKNIPPLPTDSEGFRSVGDMGYVDAEGYLYFADRRSDMIVTGGENVFAAEVEMVLKKHPKVVDAVVIGLPDPDWGHRIHAIVETNGPVGNKDLIRFALNYLPPYKIPKSIELVDHIPVNENGKVVRSKLVEESLAKGY

SEQ ID NO: 38 - protein, 511 aa, Unknown
  Description of Unknown: BaiB Pasolli 4621 Obregon-TitoAJ 2015 NO11 bin.28.fa ODBMCAMJ 01958 sequence
MCTSRFNIFNHSNNSFFTPGTQLANIAKAKPDDPAIVYISPKNTESVMTWRALEELSNRIAWYLMDQGIRSGKSVVVALPNIPTHIALAFGIWKAGACYVPVSDRLPRRNLLEICGCVSPSLVVTNRWKPSKYFSLSSTKLKEVCQEYPAEMPPDTLAVPNLANCTGGTSGKTKVVLQNMPAGGSDEGLRAWFAMTGMRFEMRQLLAGPLFHGAPHSVAFNGLFCGNTLYMPSCFDQRAIVALIKKHQIEYVQLVPTLMQRIIKMPDFNPEDLGSLKVLCHTGGVCSPDLKKEWFRILSPEKIYEIYSMTECVGITSIRGDEWLIHEGSVGKMPCGSIAIRDDNGQDLPVGQAGNIYMSWTENAPEIGFLNSPPPEISKDGFRSVGDIGYIDNDGYLYFVDRRSDMIVTGGENVFANEVETVLKKSKKVLDVVVVGIPDKEWGHRIHAIVETKEPVSDKSLIRLALDYLPPYKIPKSFEFVDEIPRNANGKVVRSTLVEQYIKNNSDSNGD

SEQ ID NO: 39 - protein, 506 aa, Unknown
  Description of Unknown: BaiB Pasolli 15003 XieH 2016 YSZC12003 35390 bin.5.fa PIKIEFGP 00584 sequence
MSVKHFNIFNTDDGKSEFSPGRQLARIAAVKPNAPAIIYISPENRETVMTWRELEVLSNKIAWYLKDQGVGSGKSVIVALGNTPTHIALAFGIWKVGGCYVPISSKVPQKNMAEICECISPILVVTNRRKPAGYTSLSTSELKELSSGYSDEMPPDTDAVPNMANCSGGTTGKTKVIQQNVPAGQSDEGLQAWFYMSGMNFEVRQLLAGPLFHGAPHSAAFNGLYCGNTLIMPAVFDAQLMVDLIKKYQVEYVQMVPTLMQRIIKLPGFKKEDMKSIKALCHTGGICSKDLKYQWLDIIPPDSLYEMYSMTECIGMTNIRGDEWLKHPGSVGKMLDGKISIRDEEGNELPAGEIGGIYMYWPTSPDVEYVNVDPIPKDASGFRTVGDMGYVDEEGYLYFADRRSDMIVTGGENVFAAEVEAVLKKHKKVTDAVVVGLPDSEWGHRIHAIVEANEPVTAKELIKFSLSFLPPYKIPKSFEFLDSIPRNESGKVVRSLLIQESLKKGF

SEQ ID NO: 40 - protein, 515 aa, Clostridium hiranonis
MNDVKCKYFNKFNTGMSDFVTPGKQLEYVAKCKPDEKAIIYIDKEDNVRDITWKELHIASNKLAWHLMKNGFGKGQVAMVSFPNGIEHILATLAVWKTGGCYMPVSCKITDTELGDICRIIKPTVSFTDKEMPCRTESIKIGSVFDVCKDESEEMPEDIAANPNMISPSGGTTGEPKFIKQNVASGLSDEIIKSWFEMSGMEFEQRQLLVGPLFHGAPHTAAFNGLFVGNTLIIPRNLRPESIVRYIKEYKIEFIQMIPTLMNRIIKLADVDKEDFKSIKALHHTGGYCSPYLKEKWIDIIGAEKVHEMYSMTEAIGITCIRGDEWLKHYGSVGLPLGGSRISIRDEEGNELGPHEVGEIHMTSPSACCMTEYINHKPLETKDGGFRSVGDFGYVDEDGYLYFSDRRSDMLVIGGENVFATEVETVLTAYEKVVDAVVVGIPDEEWGRRLHAIVQKKEEVSAEELIEYLGKHLLPYKVPKSFTFVPCIPRGDNGKVNRDKMLKGLIEKNLVNKVC

SEQ ID NO: 41 - protein, 506 aa, Unknown
  Description of Unknown: BaiB Pasolli 15265 ERR1620327 bin.47 BPCKCDAK 00027 sequence
MRTQHFNIFNTGTESFFTPGTQLANIARVKPDAPAVIYVSPENKQTVMTWLELHELSNRIAWYLLDQGIGPGKSVLAALPNIPTHIALAFGIWKTGACYVPVSNRAPQRNLMEICTCVSPALVITNRKKPDGYPSLSTAELKTLCAGYSAQLPPDVLAIPNLANCSGGTTGKTKVIEQDMPAGESDEGLRTWFSVSGMRFEMRQLLAGPLFHGAPHSAAFNGLYCGNTLVMPAKLDAETIVRLIKKYRIEYVQMVPTLMQRISRMPGFRKEDLASIEVLCHTGGVCSQDLKREWLEIIPPERLYELYAMTECIGMTSIRGDEWLRHPGSVGKMHCGRVAIRDEDGREVPHGEIGEIFMSWGDNSPRVTYKNMPPLPVDSEGFRSVGDMGYVDADGYLYFADRRSDMIVTGGENVFAAEVEMVLKKHPKVVDAVVIGLPDPDWGHRIHAIVETNAPLGSKELIRFALNYLPPYKIPKSIEFTDHIPVNENGKIVRSKLIEESLAKGY

SEQ ID NO: 42 - protein, 521 aa, Eubacterium sp.
MSTKHFNIFNTGESSFFTPGTQLANIAKVKPDAPAIVYINPENKESVMTWHSLEVLSNRIAWYLLEQGIKPGKSVIVALPNIPTHIALAFGIWKAGGCYVPISPRVPRKNMMEICECVSPSLVVTNRWKPEGYLSLSSSELKTISEEYPEHMPPDIMAVPNLANCSGGTSGKTKVIEQDMAAGESDEGLKTWFAISGMRFEMRQLLAGPLFHGAPHSVAFNGLYCGNTLYIPSCFDAKAIVTLIKKYKIEYVQMVPTLMQRIIRLPNFNPEDLQSLEVFCHTGGVCSADLKRKWFDILPPEKIYEIYSMTECVGMTSIRGDEWLAHEGSVGRMPCGQIAIRDDNGQDLPTGETGEIFMSWGPNKPKVTYKNITPLACDEHGFRSVGDIGYVDNEGYLYFQDRRSDMIVTGGENVFAAEIESVLKKHKKVNDAVVVGLPDKEWGHRIHAFVETTEPVSDKVLIKFALNYLPPYKIPKSFEHIDHIPRNESGKVVRSQMVEDYLKRHADTCSSSNTKGEKHGD

SEQ ID NO: 43 - protein, 506 aa, Unknown
  Description of Unknown: BaiB Pasolli 15265 ERR1018244 bin.34 GIGKKEJC 00810 sequence
MRTQHFNIFNTGTESFFTPGTQLANIARVKPDAPAVIYVSPENKETVMTWLELHELSNRIAWYLLDQGIGPGKSVLAALPNIPTHIALAFGIWKTGACYVPVSNRAPQRNLMEICTCVSPALVITNRKKPDGYPGLSTAELKTLCAGCSAQLPPDVLAIPNLANCSGGTTGKTKVIEQDMPAGESDEGLRTWFSVSGMRFEMRQLLAGPLFHGAPHSAAFNGLYCGNTLVMPAKLDAETIVRLIKKYRIEYVQMVPTLMQRISRMPGFRKEDLASIEVLCHTGGVCSQDLKREWLEIIPPERLYELYAMTECIGMTSIRGDEWLRHPGSVGKMHCGRVAIRDEDGREVPHGEIGEIFMSWGDNSPRVTYKNMPPLPVDSEGFRSVGDMGYVDADGYLYFADRRSDMIVTGGENVFAAEVEMVLKKHPKVVDAVVIGLPDPDWGHRIHAIVETNAPLGSKELIRFALNYLPPYKIPKSIEFTDHIPVNENGKIVRSKLIEESLAKGY

SEQ ID NO: 44 - protein, 506 aa, Unknown
  Description of Unknown: BaiB Pasolli 15265 ERR1578621 bin.18 HPOHBHHF 00903 sequence
MRTQHFNIFNTGTESFFTPGTQLANIARVKPDAPAVIYVSPENKETVMTWQELHELSNRIAWYLLDQGIGPGKSVLAALPNIPTHIALAFGIWKTGACYVPVSNRAPQRNLMEICTCVSPALVITNHKKPDGYPGLSTAELKTLCAGYSVQLPPDVLAIPNLANCSGGTTGKTKVIEQDMPAGESDEGLRTWFSVSGMRFEMRQLLAGPLFHGAPHSAAFNGLYCGNTLVMPAKLDAETIVRLIKKYRIEYVQMVPTLMQRISRMPGFRKEDLASIEVLCHTGGVCSQDLKREWLEIIPPERLYELYAMTECIGMTSIRGDEWLRHPGSVGKMHCGRVAIRDEDGRELPHGEIGEIFMSWGDNSPRVTYKNMPPLPVDSEGFRSVGDMGYVDADGYLYFADRRSDMIVTGGENVFAAEVEMVLKKHPKVVDAVVIGLPDPDWGHRIHAIVETNAPVGSKELIRFALNYLPPYKIPKSIEFTDHIPVNENGKIVRSKLIEESLAKGY

SEQ ID NO: 45 - protein, 505 aa, Unknown; identical to SEQ ID NO: 36
  Description of Unknown: BaiB Pasolli 15005 ERR414305 bin.35 IEHPGPHH 00305 sequence

SEQ ID NO: 46 - protein, 511 aa, Unknown
  Description of Unknown: BaiB Pasolli 4621 SRR2726241 bin.48 LDBMBPGB 00669 sequence
MCTSRFNIFNHSNNSFFTPGTQLANIAKAKPDDPAIVYISPKNTESVMTWRALEELSNRIAWYLMDQGIRSGKSVVVALPNIPTHIALAFGIWKAGACYVPVSDRLPRRNLLEICGCVSPSLVVTNRWKPSKYFSLSSTKLKEVCQEYPAEMPPDTLAVPNLANCTGGTSGKTKVVLQNMPAGESDEGLRAWFAMTGMRFEMRQLLAGPLFHGAPHSVAFNGLFCGNTLYMPSCFDQRAIVALIKKHQIEYVQLVPTLMQRIIKMPDFNPEDLGSLKVLCHTGGVCSPDLKKEWFRILSPEKIYEIYSMTECVGITSIRGDEWLIHEGSVGKMPCGSIAIRDDNGQDLPVGQAGNIYMSWTENAPEIGFLNSPPPEISKDGFRSVGDIGYIDNDGYLYFVDRRSDMIVTGGENVFANEVETVLKKSKKVLDVVVVGIPDKEWGHRIHAIVETKEPVSDKSLIRLALDYLPPYKIPKSFEFVDEIPRNANGKVVRSTLVEQYIKNNSDSNGD

SEQ ID NO: 47 - protein, 508 aa, Unknown
  Description of Unknown: BaiB Pasolli 15202 ERR1913015 bin.15 PGCAENMN 00628 sequence
MAETVRLNKYNRSSSDFVTPGMQLHYVAQVKPDETAAIVVHKDWQEERISWSELDKLSSRIAWMLMDKGVGQNSTVLVSYPNTIEHIAANFAIWKTGACYMPISWRTPPEELLELQKLLCPSAALTDIDVTETMFKCGMSELAEACAGYPDEMPPDVISNPNIINASGGSTGKPKLIRQNIPCGHSDLSLSSWFEVSGMKMDQTQLLCGPLFHGAPHIAAMNGIFAGGTLVLPQSLCPEFLIDCIEKYDIKFLQTVPTLMHRMIKIPGLKKESFAGMEALCHTGGVCSEWLKRAWLQLISPEKLYEMYSMTEVIGMCAIRGDEWLKHPGSVGQPKYGSKISIRDSEGNELAPFEIGNIFMSPPAGHFYTEYINEKPLDTKGDNFRSVGDMGYVDNENYLYFSDRRCDMIVTGGENVFAAEVENALLRNLHVLDAVIVGIPDPEWGRRIHAVLETDGELDVASIKEFLKNYLVPYKIPKTFEIVKRIPRLDNGKVAREAILKDCISRGV

SEQ ID NO: 48 - protein, 641 aa, Unknown
  Description of Unknown: BaiCD Pasolli 15265 XieH 2016 YSZC12003 37135 bin.19.fa ALFGHMFB 00316 sequence
MSYDALFSPIKLRGLELKNRVVLPGMNTKMVKNKHDVGEDLPAYHAARAAGGCGLNIVELVSICPECHAYLYLGLYNEHHRDELRKVTDAIHAAGGKAAVQIWHGGFVPEEFFDKTNKLETPDTLTVERIHEIVKQFGYSAKLAVEAGFDALEFHGAHTYLPHEFMNPSLNKRTDEYGNQSLENRCRFNLEVIREMRKNMPEDMPLLMRLDAIDEMLPAVTTVDETVEFIGWAQEAGLDAIDLSRGNARSLATVYEVPPYNLEPGFNMDNIAAIKARVNIPVIGVGRIVDPALADQLIREGKIDMVAVGRAQLADPEWCNKSMEGREAEIRRCIGCTEGCYDKVIDPKATHITCTRNPALCLEYKGLPKAETAKNVMVIGAGIGGLMAAEYLKARGHNPTVYEATDAPGGHFVLAGKAPKKQAFTDAVMWDAEECKRMGIEIKTGVTVTPELIKEVKPDHVIVATGAHFVKPNIPGLDTAADVFVAEDVLAGKAMPHGETIILGGGGVGCETAQFLIEHGVTDVRVMDTKRVGNKMGMLRTMFLDIEYPGETIKKSRGSKVTAVGDHEITYAFTNKAKKTVEKTRHFDSLVIATGMHSRPTQDLTDACSELGIPCDVIGSARKADMGIEATAEAYAAAMKV

SEQ ID NO: 49 - protein, 641 aa, Unknown
  Description of Unknown: BaiCD Pasolli 15265 CosteaPI 2017 SID713A074-11-90-0 bin.3.fa BFBJEEJO 00002 sequence
MSYDALFSPIKLRGLELKNRVVLPGMNTKMVKDKNDVGEDLPAYHAARAAGGCGLNIVELVSICPECHAYLYLGLYNEHHRDQLRKITDAIHAAGGKAGVQIWHGGFVPEEFFDKTNKLETPDTLTVERIHEIVKQFGYSAKLAVEAGFDALEFHGAHTYLPHEFMNPSLNKRTDEYGNQSLENRCRFNLEVIREMRKNMPEDMPLLMRLDAIDEMLPAVTTQDETVQFINWAAEAGVDAIDLSRGNARSLATVYEVPPYNLEPGFNMDNIAAIKARVNIPVIGVGRIVDPALADQLIREGKIDMVAVGRAQLADPEWCNKSMEGREAEIRRCIGCTEGCYDKVIDPKAKHITCTRNPGLCLEYKGLPKPETAKNVMVIGAGIGGLMAAEYLKARGHNPTVYEATDAPGGHFVLAGKAPKKQAFTDAVMWDAEECKRMGIEIKTGVTVTPELIKEVKPDHVIVATGAHYVAPNIPGLDTAKDVYVAEDVLAGKAMPKGETIILGGGGVGCETAQFLIEHGVTDVRVMDSKRVGNKMGMLRTMFLDIEYPGDTIKKSRNSKVTNIGDHEITYAFTNKAKKTVEKTRHFDSLVIATGMHSRPTQELTDACSELGIPCDVIGSAKKADMGIEATADAYAAAMKV

SEQ ID NO: 50 - protein, 638 aa, Unknown
  Description of Unknown: BaiCD Pasolli 15210 FengQ 2015 SID531416 bin.49.fa CEDOFBAM 00062 sequence
MSYDALFSPIKIRGLELKNRVILPGMNTKMVRNKHEIGEDMIAYHVAKAKSGCALNIFEVAAVCPEPHAYMYMGLYTDKDVEELRKLTDAVHAVGGRMGIQLWHGGFTPQFFFDETNKLETPDTLTAERLQEIEKQFGQAAKRAVDAGFDVVELHAGHSYLPHEMLSPGTNHRTDEYGGSFENRCRFVWNSIKEIRANIPDTMPLFMRCDAVDELMPEVMSEQEIVDFINRSAELGVDAVDLSRGNSLSFATVYEVPPYLLEPGFNMENIAKIKNQISIPVMGVGRVNTPDLADRLIAEGKVDMVGVGRGQITDPQWVRKAQEGHPELIRKCIGCDQGCYDAVIDPRFKTITCTRNPLACLEYKGLQKTDSPKKVMIIGGGMGGMMAAELLKTRGHEPVIYEASDKLGGQFLLAGVAPQKQEMTAAAEWEVAEVERMGIEVHLNTPVTAELVAEVKPDEVIVAVGSDYAAPAIPGAETAYHQYQVLTGEVKLSGNVCVVGCGSVGSEVAMMLAAQGCKVTAMEKKGVGNDLTMLRKMFLKPQLKGYGITGMGGTTVLGIENGKTVHYVITDRKTKETTQGSADFDAVVICMGITARGSEELQAKCAELSIPCHVIGDAKQARTALWATREAAEVALAI

SEQ ID NO: 51 - protein, 639 aa, Unknown
  Description of Unknown: BaiCD Pasolli 15209 RaymondF 2016 P21E7 bin.22.fa DDJCLBHB 00368 sequence
MSYEALFNPIKIRGLELKNRVVLPGMNTKMVRNKHEIGEDMIAYHVAKAKAGCALNIFEVAAVCPEPHAYMYMGLYTDKDVEELRKLTDAVHAVGGRMGIQLWHGGFTPQFFFDESNKLETPDTLTVERLQEIEKQFGQAAKRAVDAGFDVVELHGGHSYLPHEMLSPGTNHRTDEYGGSFENRCRFVWNCIKEIRANIPDTMPLFMRCDAVDELMQENMTEQEIVDFINRSAELGVDVVDLSRGNSMSFATVYEVPPYMLEPGFNMENIARIKGQISIPVMGVGRVNYPELADKLIADGKIDLVGIGRGQITDPQWVKKAQEGHPELIRKCIGCDQGCYDAVIDPRFKTITCTRNPLACLEYKGLPKTESPKKVMVIGGGMGGMIAAEILKARGHEPVIYEASDKLGGQFLLAGVAPQKHEMTEAAEWEAKEVERMGIEFHLNTAVTPELVAEVKPDEVIIAVGSDYVAPAAIPGAETAYHQYQVVKGEVKLSGNVCVVGCGSVGSEVAMILATQGCKVTVMEKKGVGNDLTMLRKMFLKPQLKGYGITAMSGTNVLGIENGKKVHFVVTDRKTKETTQGSADFDAVVICMGITARSSDGLQAKCAELGIPCHVIGDAKQARTALWATREAAQIALEM

SEQ ID NO: 52 - protein, 638 aa, Unknown
  Description of Unknown: BaiCD Pasolli 15211 LouisS 2016 AS60 3 bin.9.fa GHGEBOMP 00335 sequence
MSFDALFSPLKVRGLELKNRVVLPGMNTKMVRNKHEIGEDMIAYHVAKAKSGCALNIFEVAAVCPEPHAYMYMGIYTDKDVEELRKLTDAVHAVGGRMGIQLWHGGFTPQFFFDDTNKLETPDTLTVERLQEIEKQFGQAAKRAVDAGFDVIEYHGGHSYLPHEMLSPGTNHRTDEYGGSFENRCRFAWNCIKEIRANIPDTMPLFMRCDAVDELMPEVMTEEEIVKFINRSAELGVDVVDLSRGNSMSFATVYEVPPYLLEPGFNMENIARIKSQISIPVMGVGRVNTPELADKLIADGKIDLVGVGRGQITDPQWVKKAQEGHPELIRKCIGCDQGCYDAVIDPRFKTITCTRNPLACLEYKGLPKTDAPKKVMIIGGGMGGMLAAEILKARGHEPAIYEASDKLGGQFLLAGVAPQKHEMTEAAEWEVKEIERMGIEVHLNTAVTPELIAEVKPDEVIVAIGSDYVAPAIPGAETAYHQYQVVKGEVKLSGNVCVVGCGSVGSEVAMILATQGCKVTVMEKKGVGNDLTMLRKMFLKPQLKGYGITGMGGTTVLGIENGKTVHYVITDRKTKETTQGSADFDAVVICMGITARGSEELQAKCAELSVPCHVIGDAKQARTALWATREAAEVALNI

SEQ ID NO: 53 - protein, 639 aa, Unknown
  Description of Unknown: BaiCD Pasolli 15202 Bengtsson-PalmeJ 2015 TRAVELRES21 bin.108.fa KLDDHOPD 00146 sequence
MSYEALFNPIKIRGLELKNRVVLPGMNTKMVIKKHGIGEDMIAYHVAKAKAGCALNIFEVAAVCPEPHAYMYMGLYTDKDVEELRKLTDAVHEVGGLMGIQLWHGGFTPQLFFDESNKLETPDTCTVERLQEIEKQFGQAAKRAVDAGFDVVEFHAAHSYLPHELLSPGTNHRTDEYGGSFENRCRFAWNCIKEIRANIPDTMPIFMRVDAIDELMPEVMSEQEIVDFINRSAELGVDAVDLSRGNSMSFATVYEVPPYPLEPGFNMGNIAKIKSQVNIPVMGVGRVNTPELANQLIADGKVDMVGIGRGQITDPQWVKKAQEGHPELIRKCIGCDQGCYDAVIDPRFKTITCTRNPLACLEYKGLSKAETPKKVMIIGGGMGGMLAAEILKARGHEPVIYEADNKLGGQFLLAGVAPQKGEMTAAAEWEAKEVERMGIEVHLNTTVTPELIAEVKPDEVIVAIGSDYVVPASIPGAETAYHQYQVVKGEVKLSGNVCVVGCGSVGSEVAMILAAQGCKVTVMEKKGVGNDMTMLRKMFLKPQLKGFGITGMSGTTVLGIENGKKVHYVITDRKTKETTQGSADFDAVVICMGITARPSDALQAKCAELGIPAHVIGDAKQARTALWATREAAEVAMEI

SEQ ID NO: 54 - protein, 641 aa, Unknown
  Description of Unknown: BaiCD Pasolli 15265 Obregon-TitoAJ 2015 SM11 bin.2.fa LFPPKIPJ 00392 sequence
MSYDALFSPIKLRGLELKNRVVLPGMNTKMVKNKNFVADDLPAYHAARAAGGCGLNIVEIASICPECHAYLYLGLYNEQQRDEIKKITEAIHANGGKAAVQIWHGGFVPADFFDKTNVLETPDTLTVERIHEIVKQFGVSAKLAVEAGFDALEFHGAHTYLPHEFMNPSLNKRTDEYGNQSLENRCRFNLEVIREMRANMPEDMPLLMRLDAIDEMLPAVTTVDETVQFVKWAHEAGVDAIDLSRGNARSLATVYEVPPYNLEPGFNMDNIAAIKERVDIPVIGVGRVTTPDLADKLIKEGKIDMIAIGRGQLVDPEWCKKAMEGRDNEIRKCIGCTQGCYDKVIDPKATHITCTRNPMLCLEYKGLPKAETAKNVMVIGAGIGGLTAAEFLKARGHNPTVYEASEQAGGEFVLAGVAPKKKEFTEAVLWEVEECKRRGIEIKTGTTVTPELIAEVKPDHVIVATGAHYVMPNIPGLEGNENVVFAEDVLTGKVEPKGEVVVLGGGGTGCETAQYLIDKGIKDVRVMDTKRVGNGMGMLRTMFLDIEYPGDTIKKSNRSKVVSVEGNTINYKFTDKFKKTSDKTRHFDTLVIATGMVSRPTGDLTAKCEELGIPYDVIGDAKQARMGIDATAEAYEVGMKI

SEQ ID NO: 55 - protein, 640 aa, Unknown
  Description of Unknown: BaiCD Pasolli 15002 LiJ 2014 V1.FI04 bin.94.fa MJMNNJHI 01043 sequence
MSYDALFSPIKIRGLELRNRVVMPGMNTKMVKNKHDISDDLPAYHAARAAGGCGLNIVEIASVCPESHGNIYLGLYNEHHRDELKKVTKAIHDNGGKACIQIWHGGFVPAEFFDKTNKVETPDDLTVERIHEIVKQFGVSAKLACEAGFDALEFHGAHTYLPHEFMNPFLNKRTDEYGNQSLENRCRFSLEVIREMRANMPEEMPLIMRLDAIDEMLPAVTTLDELVEFIGWAAEAGVDAVDLSRGNARSLATVYEVPPYNLEPGFNMDNIAAVKERISIPVIGVGRVNTPALADKLISEGKIDMIAVGRGQLVDPEWCNKAKEGRDDEIRRCIGCTQGCYDKVIDPKAKHITCTRNPMLCLEYKGMTKTDSPKNVMIIGAGIGGLLAAQFLKARGHNPTVYEAEEQAGGQFLLAGKAPKKQEFIDAINWDIKECQRKGIEIKTGVTVDGDMIAQIKPDHVIIATGAHYVAPEIPGIDGEDIYLAEDVLSGKVQPKGEIVILGGGTVGCETAQFLVSKGEKNVRIMDAKRVGNNMGMLRTMFMDIEYPGDTIKKSNRAKVTSIDGHTINYKFTDKFKKTSDKSRQFDSLVVATGTTSRPTGELTAKCEELGIPYDVIGDAKKVRMGIDATADAYEVGTRI

SEQ ID NO: 56 - protein, 639 aa, Unknown
  Description of Unknown: BaiCD Pasolli 15004 FengQ 2015 SID31866 bin.65.fa NCFGPKLH 00818 sequence
MSYDALFSPIKLRGLELKNRVLLPGMNTKMVKNKDFVSDDLVAYHAARAAGGCGLNIVELVAVCPQVHAYLYLGLYKDEHIAELRKVTEAIHANGGKAGVQLWHGGFVPQEFFDKTNKLETPDTLSVEDIHRIVNEFGAAAKRAVEAGFDTVEYHAAHTYLPHEFLNAYLNTRTDEYGGSFENRCRFPLECIKAIRENIPEDMPLFMRLDAIDEMMPKNMSEDDIVNFINMAADAGVDIVDLSRGNARSNATVYEVPPYNLEPGFNMDIIANVKSRIKIPVAGVGRINTAKLANELIAEGKCDMVAVGRAQLADPEWCNKSREGREDEIRMCIACTQGCYDKVIDPKSTHITCNRNPMLCLEYKGMPKTDAPKNVMIIGGGIGGMMTAEFLKARGHNPTIYEASEALGGTFVLAGKAPKKGAFTEAALWEAKQCARMGIEIKTGVTVTPELIAEVKPDHVVIATGAEYTAPAIPGIDGADIVSALDILSGKATAHGETIVLGGGGVGIEVAQYLYEHGVTNVRIMDKVRVANGTGMLRNMFLNLEYTPDQIKRSNKSNVTEIGDHEITYKFTDKFKKTSVKTRRFDTLVVALGAVSRPTEALTAKCEELNIPFDVIGDAKKPGMGIDATAQAYEVGTRI

SEQ ID NO: 57 - protein, 640 aa, Unknown
  Description of Unknown: BaiCD Pasolli 15005 LiJ 2014 MH0358 bin.56.fa NPCPOAJM 00312 sequence
MKYDALFSPIKLRGLELRNRVVMPGMATKMAKGKHDIHEDLPAYHAARAAGGCGLNIIEIVSTSYQPHATIYLGLYNEHHRDELKKVTKAIHDAGGKACAQIWHGGFVPEAFFDETNVRETPDTITVERIHEIVKQFGYSAKLGVEAGLDALEFHAAHTYLPHEFLNPYLNNRTDEYGNQSLENRARFSLEVIREMRANMPEDMPLIMRLDAIDEMLPKVTTLEETITFINWAADAGVDAADLSRGNASSLATVYEVPPYNLEPGFNMDNIKAVKDGIKIPVIGVGRVNTPEKANQLIEDGYVDMIAVGRAQLVDPNWVKKAMEGRDNEIRKCIGCCQGCYDKVVDPKATHITCTRNPMLCLEYKGINPAETAKNVMVVGGGIGGLMTAEFLKMRGHNPVVYEAEQEAGGQFVLAGKAPKKQEFTDAILWEVEECKRRGIEIKTGTKVTPELIAEVKPDHVVIATGARYVAPEIPGIDNADVVSAQDVLAGKVEAKGEVLIIGGGGVGCETAQYLVSKGVTDVRVMDQKRVGNNMGMLRTMFQDIEFPGDMIKKSNKSKLVSIGDHEITYKFTGKDKKTVEKTRHFDTLIIAYSTVSYPYADLTAKCDELGIAYDVIGDAKQVRMGIDATAEAYEVGMRI

SEQ ID NO: 58 - protein, 374 aa, Unknown
  Description of Unknown: BaiCD Pasolli 15265 LiuW 2016 SRR3992994 bin.12.fa OBMFBIGE 01191 sequence
MDNIAAIKARVNIPVIGVGRIVDPALADQLIREGKIDMVAVGRAQLADPEWCNKSMEGREAEIRRCIGCTEGCYDKVIDPKAKHITCTRNPALCLEYKGLPKPEKAKNVMVIGAGIGGLMAAEYLKARGHNPTVYEATDAPGGHFVLAGKAPKKQAFTDAVMWDAEECKRMGIEIKTGVTVTPELIKEVKPDHVIVATGAHFVAPNIPGLDTAKDVYVAEDVLAGKAMPHGETIILGGGGVGCETAQFLIEHGVTDVRVMDSKRVGNKMGMLRTMFLDIEYPGETIKKSRGSKITAVGDHEITYAFTNKAKKTVEKTRHFDSLVIATGMHSRPTQELTDACSELGIPCDVIGSAKKADMGIEATADAYAAAMNV

SEQ ID NO: 59 - protein, 640 aa, Unknown
  Description of Unknown: BaiCD Pasolli 4621 Obregon-TitoAJ 2015 NO11 bin.28.fa ODBMCAMJ 01963 sequence
MSYDALFSPIKLRGLELKNRVVLPGMNTKMAKNKHDVAEDLTGYHGAIAAGGCGLNIVEIATICPECHAYLYLGLYNEHHRDELKKIVDAIHENGGKAAVQIWHGGFVPQEFFDKTNKLETPDNLTVERIHEIIRQYGQAAKFAVEAGFDALEFHGAHTYLPHEFMNPSLNQRTDEYGNQSLENRCRFSLEVIREMRANMPDDMPLIMRIDAIDEMLPKVTTVEETIQFINWAEEAGVDAMDLSRGNARSLATVYEVPPYNLEPGFNMDNIAAIKKGIHIPVIGVGRVNMPGLADELIREGKIDMIAVGRGQLADPQWCNKAKEGREEDIRRCIGCTEGCYDKVIDPNAKHITCTRNPMLCLEYKGLPKAETPKNVMVIGGGIGGLVTAEFLKARGHNPTIYEAAENPGGRFVLAGKAPKKQEFAAAVEWEIEQCRKKGIEIKTGTKVTPELIEEVKPDHVIIATGSEYVKPDIPGIDGADVVSAEDILTDKAEAKGEVLILGGGLIGCETAQYLINKGVKDVRIMDKKRVGNKMGMLRTMFLDIEYPGKTIQKSNRSNITSIGDHEITYKFTDKFKKTSEKTRHFDTLVISVGTTSRKTEDLKAKCEELGIAYDVIGDAKKVGMGIDATADAYAVGMNV

SEQ ID NO: 60 - protein, 640 aa, Unknown
  Description of Unknown: BaiCD Pasolli 15003 XieH 2016 YSZC12003 35390 bin.5.fa PIKIEFGP 00577 sequence
MSYDALFSPFKLRGLELKNRVVLPGMNTKMVKNKHDIAEDLAAYHAARAAGGCALNIVEPACVCPETHAYLYLGLYTEHHSEELKKVTKAIHDNGGLACVQIWHGGFVPEAFFDKTNKRETPDTITHERIQEIIKQYGASAKLAVEAGFDALEFHAAHTYLPHEFMNPFLNKRTDEYGNQSLENRCRFNLEVIREMRANMPEDMPLLMRLDAIDELMPKVTTVEETIQFINWAAEAGVDAADLSRGNAMSLATVYEVPPYNLEPGFNMDNIAAVKAGISIPVIGVGRVNTPDVANKLIEEGKIDMIAVGRGQLVDPEWCNKAKEGRTDEIRLCIGCTQGCYDKVVDPKANHITCTRNPMLCLEHQGLPKTDSPKNVMVIGAGIGGLLTAQFLKARGHNPTIYEASEKAGGQFVLAGAAPKKQEFAAAVEWEVKECQRRGIEIKTGVTVTPELIAEVKPDHVVIATGAHYVAPEIPGIDSADVVTAEDVLTGKVEPKGEVVILGGGTVGCEVAQYLVSKGEKNVRVMDAKRVGNNMGMLRTMFMDIEYPGDAIKKSNKSKVTSIEDHTINYKFTDKFKKTSDKSRHFDTLVVATGTVSRPTADLTAKCEELGIAYDVIGDAKQVRMGLDATADAYAVAYRI

SEQ ID NO: 61 - protein, 641 aa, Unknown
  Description of Unknown: BaiCD Pasolli 15265 ERR1620327 bin.47 BPCKCDAK 00033 sequence
MSYDALFSPIKLRGLELKNRVVLPGMNTKMVKNKHDVGEDLPAYHAARAAGGCGLNIVELVSICPECHAYLYLGLYNEHHRDELRKVTDAIHAAGGKAAVQIWHGGFVPEEFFDKTNKLETPDTLTVERIHEIVKQFGYSAKLAVEAGFDALEFHGAHTYLPHEFMNPSLNKRTDEYGNQSLENRCRFNLEVIREMRKNMPEDMPLLMRLDAIDEMLPAVTTVDETVEFIGWAQEAGLDAIDLSRGNARSLATVYEVPPYNLEPGFNMDNIAAIKERVNIPVIGVGRIVDPALADQLIREGKIDMVAVGRAQLADPEWCNKSKEGREAEIRRCIGCTEGCYDKVIDPKATHITCTRNPALCLEYKGFPKAETAKNVMVIGAGIGGLMAAEYLKARGHNPTIYEATDAPGGHFVLAGKAPKKQAFTDAVMWDAEECKRMGIEIKTGVTVTPELIKEVKPDHVIVATGAHFVKPNIPGLDTAADVFVAEDVLAGKAMPHGETIILGGGGVGCETAQFLIEHGVTDVRVMDTKRVGNKMGMLRTMFLDIEYPGETIKKSRGSKVTAVGDHEITYAFTNKAKKTVEKTRHFDSLVIATGMHSRPTQELTDACSELGIPCDVIGSARKADMGIEATAEAYAAAMKV

SEQ ID NO: 62 - protein, 640 aa, Eubacterium sp.
MSYDALFSPIKLRGLELKNRIVLPGMNTKMVKDKHHVADDMIQYHAARAAGGCGLNIVELVSICKECHAYLYFGLYSEADRDELKKVTDAIHENGGKAAVQIWHGGFVPEEFFDKTNKTETPDNLTVERIHEIVKQFGESAKLAVEAGFDALEFHGAHTYLPHEFMNPSLNKRTDEYGNQSLENRCRFSLEVIREMRANMPEDMPLLMRMDAIDEMLPKVTTVEETIQFINWAEEAGVDAIDLSRGNARSLATVYEVPPYNLAPGFNMDNIAKVKKGVNIPVIGVGRVNMPALADKLIKDGEIDMISIGRAQLADPEWANKAKEGREDEIRRCIGCTEGCYDKVIDPKSTHITCTRNPMVCLEYKGLPKPEKAKDVMVIGGGIAGMMAAEILKKRGHNPTIYEASDIAGGRFRLAGKAPKKQEFEAAIDWEIKECERLGIEIKTNTTVTPEMIAEIKPDHVVVAIGSEFATPDLPGADGADVVTAEDVLAGKVEPKGEILILGGGLVGCETAQFLVNKGEKNVRVMDSRRVGKAMGMLRSMFMDIEYPGKTIQKSHRSKVTAIGDHTVDYKFTDKFKKTSDKTRSFDTLVLATGAKSRPTADLTAKCDELGIAYNVIGDAKKVRMGIDATADAYKVGMEV

SEQ ID NO: 63 - protein, 641 aa, Unknown; identical to SEQ ID NO: 48
  Description of Unknown: BaiCD Pasolli 15265 ERR1018244 bin.34 GIGKKEJC 00805 sequence

SEQ ID NO: 64 - protein, 641 aa, Unknown
  Description of Unknown: BaiCD Pasolli 15265 ERR1578621 bin.18 HPOHBHHF 00908 sequence
MSYDALFSPIKLRGLELKNRVVLPGMNTKMVKNKHDVGEDLPAYHAARAAGGCGLNIVELVSICPECHAYLYLGLYNEHHRDELRKVTDAIHAAGGKAAVQIWHGGFVPEEFFDKTNKLETPDTLTVERIHEIVKQFGYSAKLAVEAGFDALEFHGAHTYLPHEFMNPSLNKRTDEYGNQSLENRCRFNLEVIREMRKNMPEDMPLLMRLDAIDEMLPAVTTVDETVEFIGWAQEAGLDAIDLSRGNARSLATVYEVPPYNLEPGFNMDNIAAIKERVNIPVIGVGRIVDPALADQLIREGKIDMVAVGRAQLADPEWCNKSMEGREAEIRRCIGCTEGCYDKVIDPKATHITCTRNPALCLEYKGLPKAETAKNVMVIGAGIGGLMAAEYLKARGHNPTIYEATDAPGGHFVLAGKAPKKQAFTDAVMWDAEECKRMGIEIKTGVTVTPELIKEVKPNHVIVATGAHFVKPNIPGLDTAADVFVAEDVLAGKAMPHGETIILGGGGVGCETAQFLIEHGVTDVRVMDTKRVGNKMGMLRTMFLDIEYPGETIKKSRGSKVTAVGDHEITYAFTNKAKKTVEKTRHFDSLVIATGMHSRPTQELTDACSELGIPCDVIGSARKADMGIEATAEAYAAAMKV

SEQ ID NO: 65 - protein, 640 aa, Unknown; identical to SEQ ID NO: 57
  Description of Unknown: BaiCD Pasolli 15005 ERR414305 bin.35 IEHPGPHH 00300 sequence

SEQ ID NO: 66 - protein, 640 aa, Unknown
  Description of Unknown: BaiCD Pasolli 4621 SRR2726241 bin.48 LDBMBPGB 00664 sequence
MSYDALFSPIKLRGLELKNRVVLPGMNTKMAKNKHDVAEDLTGYHGAIAAGGCGLNIVEIATICPECHAYLYLGLYNEHHRDELKKIVDAIHENGGKAAVQIWHGGFVPQEFFDKTNKLETPDNLTVERIHEIIRQYGQAAKFAVEAGFDALEFHGAHTYLPHEFMNPSLNQRTDEYGNQSLENRCRFSLEVIREMRANMPDDMPLIMRIDAIDEMLPKVTTVEETIQFINWAEEAGVDAMDLSRGNARSLATVYEVPPYNLEPGFNMDNIAAIKKGIHIPVIGVGRVNMPGLADELIREGKIDMIAVGRGQLADPQWCNKAQEGREEDIRRCIGCTEGCYDKVIDPNAKHITCTRNPMLCLEYKGLPKAETPKNVMVIGGGIGGLVTAEFLKARGHNPTIYEAAENPGGRFVLAGKAPKKQEFAAAVEWEIEQCRKKGIEIKTGTKVTPELIEEVKPDHVIIATGSEYVKPDIPGIDGADVVSAEDILTDKAEAKGEVLILGGGLIGCETAQYLINKGVKDVRIMDKKRVGNKMGMLRTMFLDIEYPGKTIQKSNRSNITSIGDHEITYKFTDKFKKTSEKTRHFDTLVISVGTTSRKTEDLKAKCEELGIAYDVIGDAKKVGMGIDATADAYAVGMNV

SEQ ID NO: 67 - protein, 639 aa, Unknown
  Description of Unknown: BaiCD Pasolli 15202 ERR1913015 bin.15 PGCAENMN 00629 sequence
MSYEALFNPIKIRGLELKNRVVLPGMNTKMVIKKHGIGEDMIAYHVAKAKAGCALNIFEVAAVCPEPHAYMYMGLYTDKDVEELRKLTDAVHEVGGLMGIQLWHGGFTPQLFFDESNKLETPDTCTVERLQEIEKQFGQAAKRAVDAGFDVVEFHAAHSYLPHELLSPGTNHRTDEYGGSFENRCRFAWNCIKEIRANIPDTMPIFMRVDAIDELMPEVMSEQEIVDFINRSAELGVDAVDLSRGNSMSFATVYEVPPYPLEPGFNMGNIAKIKSQVNIPVMGVGRVNTPELANQLIADGKVDMVGIGRGQITDPQWVKKAQEGHPELIRKCIGCDQGCYDAVIDPRFKTITCTRNPLACLEYKGLSKAETPKKVMIIGGGMGGMLAAEILKARGHEPVIYEADSKLGGQFLLAGVAPQKGEMTAAAEWEAKEVERMGIEVHLNTTVTPELIAEVKPDEVIVAIGSDYVVPASIPGAETAYHQYQVVKGEVKLSGNVCVVGCGSVGSEVAMILAAQGCKVTVMEKKGVGNDMTMLRKMFLKPQLKGFGITGMSGTTVLGIENGKKVHYVITDRKTKETTQGSADFDAVVICMGITARPSDALQAKCAELGIPAHVIGDAKQARTALWATREAAEVAMEI

SEQ ID NO: 68 - protein, 177 aa, Unknown
  Description of Unknown: BaiE Pasolli 15265 XieH 2016 YSZC12003 37135 bin.19.fa ALFGHMFB 00315 sequence
MTVEERLEALEKEVQRLKDVQAIKELKSKYFRALDTKNWDELETTMTPNISTAYSNGKLVFHGPKEITNYFKESMPDTEITLHQGHNPVIWFESDTVAYGKWYLQDNLIFAEGNPYCGTQIQGSAIYTDKYVKVDGEWLIEDTGYLRVYEESFQRDKTHRIRINMFRPKKKKVIKKK

SEQ ID NO: 69 - protein, 176 aa, Unknown
  Description of Unknown: BaiE Pasolli 15188 KarlssonFH 2013 S54 bin.27.fa BBGPADBL 00949 sequence
MTVEERLEALEKEVQRLKDIDEIKCLKARYFAALDTKDWEALKATFHPDIETAYSDGKLVFHGPEEVANYMAESMPKTEITLHQGHTPEIEILSDTEAVGHWYLQDNLIFAQDNPYEGLQIQGSALYTDKYVKVDGKWLIMETGYLRIYEESFQRDNTHRIRINMFRPKKKKVAKK

SEQ ID NO: 70 - protein, 177 aa, Unknown
  Description of Unknown: BaiE Pasolli 15265 CosteaPI 2017 SID713A074-11-90-0 bin.3.fa BFBJEEJO 00003 sequence
MTVEERLEALEKEVQRLKDVQAIKELKSKYFRALDTKNWDELETTMTPNISTAYSNGKLVFHGPKEITNYFKESMPHTEITLHQGHNPVIWFESDTVAYGKWYLQDNLIFAEGNPYCGTQIQGSAIYTDKYVKVDGEWLIEDTGYLRVYEESFQRDNTHRIRINMFRPKKKKVIKKK

SEQ ID NO: 71 - protein, 173 aa, Unknown
  Description of Unknown: BaiE Pasolli 15210 FengQ 2015 SID531416 bin.49.fa CEDOFBAM 00064 sequence
MTIEERLEALEKETQKLRDVIEIMNLKGKYFRCLDSKDWDGLETTFSPNVSTSYSNGKLSFHGPKEVTNYFKQTMPAEMISMHMGHTPEIIVNDDNTAVGHWYLQDNLIFTEGSPYAGIGIQGGAFYTDKYEKIDGQWLIVETGYVRIYEESFKRPHTRMTANMHAKKEEKAE

SEQ ID NO: 72 - protein, 173 aa, Unknown
  Description of Unknown: BaiE Pasolli 15209 RaymondF 2016 P21E7 bin.22.fa DDJCLBHB 00370 sequence
MTIEERLEALEKETQKLRDVIEIMNLKGKYFRCLDSKDWDGLETTFSPNVSTSYSNGKLSFHGPKEVTNYFKQTMPAEMISMHMGHTPEITVNDDGTAVGRWYLQDNLIFTEGSPYAGIGIQGGAFYTDKYEKIDGKWLIVETGYVRIYEESFKRPHTRMTANMHAKPTEKAE

SEQ ID NO: 73 - protein, 177 aa, Unknown
  Description of Unknown: BaiE Pasolli 15265 SchirmerM 2016 G89065 bin.22.fa EBDJMKCO 00365 sequence
MTVEERLEALEKEVQQLKDVQAIKELKSKYFRALDTKNWDELETTMTPNISTAYSNGKLVFHGPKEITNYFKESMPDTEITLHQGHNPVIWFESDTVAYGKWYLQDNLIFADGNPYCGTQIQGSAIYTDKYVKVDGQWLIEDTGYLRVYEESFQRDKTHRIRINMFRPKKKKVIKKK

SEQ ID NO: 74 - protein, 173 aa, Unknown
  Description of Unknown: BaiE Pasolli 15202 Bengtsson-PalmeJ 2015 TRAVELRES21 bin.108.fa KLDDHOPD 00148 sequence
MTIEERLEALEKETQKLRDVIEIMNLKGKYFRCLDSKDWDGLETTFSPNVSTSYSNGKLVFHGPKEVTNYFKKTMPAEMISMHMGHTPEITVNDDGTAVGRWYLQDNLIFTEGSPYAGVGIQGGAFYTDKYEKIDGKWLIVDTGYVRIYEESFKRPQTRITANMHAKKEEKAE

SEQ ID NO: 75 - protein, 175 aa, Unknown
  Description of Unknown: BaiE Pasolli 15265 Obregon-TitoAJ 2015 SM11 bin.2.fa LFPPKIPJ 00393 sequence
MTVEERLEALEKEVQRLKDVQAIKELKSKYFRALDTKDWDALETTMTPNISTAYSNGKLVFHGPKEITNYFKESMPNTEITLHQGHNPVIWFESDTVAYGKWYLQDNLIFAEGNPYEGLQIQGSAIYTDKYVKIDGEWLIEDTGYLRVYEESFQRDKSHRIRINMFRPKKKAVKK

SEQ ID NO: 76 - protein, 176 aa, Unknown
  Description of Unknown: BaiE Pasolli 15002 LiJ 2014 V1.FI04 bin.94.fa MJMNNJHI 01044 sequence
MTVEERLEALEKEVQRLKDIEEIKALKSRYFRALDTKNWDELEATLHPDITTSYSNGKLVFHGPKEVTNYFKENMPTTQITMHQGHNPAITIDSETEATGMWYLQDNLIFTEGNPYAGTQIQGSAIYTDKYVKVDGQWLIKETGYLRVYEESFQRDKTHHISINLFRPKKKKVVKK

SEQ ID NO: 77 - protein, 177 aa, Unknown
  Description of Unknown: BaiE Pasolli 15004 FengQ 2015 SID31866 bin.65.fa NCFGPKLH 00819 sequence
MTVEERLEALEKEIQQLKDIEAIKALKSRYFRALDTKDWDALETTLSPDISTSYSNGKLVFHGPKEVTNYFKEVMPATEITLHQGHNSEITLESDTVAYGKWYLQDILIFAEGNPYCGTQIQGSAIYTDKYVKVDGQWLIQETGYLRIYEESWQRDKTHYIKTNMHQPKKKKVIKKK

SEQ ID NO: 78 - protein, 176 aa, Unknown
  Description of Unknown: BaiE Pasolli 15005 LiJ 2014 MH0358 bin.56.fa NPCPOAJM 00313 sequence
MTVEERLEALEKEVQRLKDIDEIKCLKARYFAALDTKDWDGLKATLHPDIETAYSDGKLVFHGPEEVGNYMAESMPQTEITLHQGHTPEIEIISDTEAVGHWYLQDNLIFAKDNPYEGLQIQGSALYTDKYEKVDGKWLIKETGYLRIYEESFQRDSTHRIRINMFRPKKKKVAKK

SEQ ID NO: 79 - protein, 177 aa, Unknown
  Description of Unknown: BaiE Pasolli 15265 LiuW 2016 SRR3992994 bin.12.fa OBMFBIGE 01190 sequence
MTVEERLEALEKEVQQLKDVQAIKELKSKYFRALDTKNWDELETTMTPNISTAYSNGKLVFHGPKEITNYFKESMPDTEITLHQGHNPVIWFESDTVAYGKWYLQDNLIFAEGNPYCGTQIQGSAIYTDKYVKVDGQWLIEDTGYLRVYEESFQRDKTHRIRINMFRPKKKKVIKKK

SEQ ID NO: 80 - protein, 182 aa, Unknown
  Description of Unknown: BaiE Pasolli 4621 Obregon-TitoAJ 2015 NO11 bin.28.fa ODBMCAMJ 01964 sequence
MTIEERLEALEKEVQQLKDVQAIKELKSRYFCAMDTKDWEAMEATMAPDIETSYSDGKLVFHGPKEITNYLAETMPKTEITLHQGHNPQIWFESDTVAYGKWYLQDDLLFDKGDTYEGLEIRGSAIYTDKYVKIDGQWLIQDTGYLRIFEESSQRDATHRVRISMFRPATKKKKIAKRKTTK

SEQ ID NO: 81 - protein, 176 aa, Unknown
  Description of Unknown: BaiE Pasolli 15003 XieH 2016 YSZC12003 35390 bin.5.fa PIKIEFGP 00576 sequence
MTVEERLEALEKEIQRLKDIEEIKALKSRYFAALDTKDWEGLKATFHPDVTTSYSDGKLSFHGPEEVANYMAENMPQTEITLHQGHTPEIIIVSDTEAIGHWYLQDNLIFAQGNPYEGLQIQGSALYTDKYEKVDGKWLIKETGYLRIYEESFQRDKSHFIRINMFRPKKKKVVKK

SEQ ID NO: 82 - protein, 168 aa, Unknown
  Description of Unknown: BaiE midas Clostridium hiranonis 61655 BackhedF 2015 SID70 12M bin.15.fa PKPCOPIK 00355 sequence
MTLEARIEALEKEIQRLNDIEAIKQLKAKYFRCLDGKLWDELETTLSPNIETSYSDGKLVFHSPKEVTEYLAAAMPKEEISMHMGHTPEITIDSENTATGRWYLEDNLIFTDGKYKNVGINGGAFYTDKYEKIDGQWYIKETGYVRIFEEHFMRDPKIHITSNMHKEK

SEQ ID NO: 83 - protein, 177 aa, Unknown
  Description of Unknown: BaiE Pasolli 15265 ERR1620327 bin.47 BPCKCDAK 00034 sequence
MTVEERLEALEKEVQRLKDVQAIKELKSNYFRALDTKNWDELETTMTPNISTAYSNGKLVFHGPKEITNYFKESMPDTEITLHQGHNPVIWFESDTVAYGKWYLQDNLIFAEGNPYCGTQIQGSAIYTDKYVKVDGEWLIEDTGYLRVYEESFQRDNTHRIRINMFRPKKKKVIKKK

SEQ ID NO: 84 - protein, 186 aa, Eubacterium sp.
MTVEERLEALEKELQQIKDVQAIKELKSKYFQALDTKNWDELETTMAPDIETAYSNGKLVFHGPKEITDYFKKSMPKTEITLHQGHNPQVWFESDTVAYGKWYLEDRLIFAKGDPYEGLQVEGSAIYTDKYVKIDGEWLIQDTGYIRIYEEQFMRDETHRIRKNMFAPKKKKVVKKKKTAAVKKEQ

SEQ ID NO: 85 - protein, 177 aa, Unknown; identical to SEQ ID NO: 68
  Description of Unknown: BaiE Pasolli 15265 ERR1018244 bin.34 GIGKKEJC 00804 sequence

SEQ ID NO: 86 - protein, 177 aa, Unknown
  Description of Unknown: BaiE Pasolli 15265 ERR1578621 bin.18 HPOHBHHF 00909 sequence
MTVEERLEALEKEVQRLKDVQAIKELKSKYFRALDTKNWDELETTMTPNISTAYSNGKLVFHGPKEITNYFKESMPDTEITLHQGHNPVIWFESDTVAYGKWYLQDNLIFAEGNPYCGTQIQGSAIYTDKYVKVDGEWLIEDTGYLRVYEESFQRDNTHRIRINMFRLKKKKVIKKK

SEQ ID NO: 87 - protein, 176 aa, Unknown; identical to SEQ ID NO: 78
  Description of Unknown: BaiE Pasolli 15005 ERR414305 bin.35 IEHPGPHH 00299 sequence

SEQ ID NO: 88 - protein, 182 aa, Unknown; identical to SEQ ID NO: 80
  Description of Unknown: BaiE Pasolli 4621 SRR2726241 bin.48 LDBMBPGB 00663 sequence

SEQ ID NO: 89 - protein, 173 aa, Unknown
  Description of Unknown: BaiE Pasolli 15202 ERR1913015 bin.15 PGCAENMN 00631 sequence
MTIEERLEALEKETQKLRDVIEIMNLKGKYFRCLDSKDWDGLETTFSPNVSTSYSNGKLVFHGPKEVTNYFKKTMPAEMISMHMGHTPEITVNDDGTAVGRWYLQDNLIFTEGSPYAGVGIQGGAFYTDKYEKIDGKWLIVDTGYVRIYEESFKRPQTRMTANMHAKKEEKAE

SEQ ID NO: 90 - protein, 450 aa, Unknown
  Description of Unknown: BaiF Pasolli 15265 XieH 2016 YSZC12003 37135 bin.19.fa ALFGHMFB 00297 sequence
MSTQYKDYYGTHMPFGQFPKFGVLSSVKVLMTGTNIAGPFAASIMAEMGAQVIQVEAPNMPCQTRGNYGYSQDHRNTYSITLNTRTAKGREVLEKLIAWADIWIESGRPGTYAKSGLSDEHMWKINRKLAIVHVSGYGQTGPDRNKAAYDVSGQAMGGYMYMNGTSPTSPPLKVNPYLSDYATAYNACICALSIMTNARITGEGDACDVSQYETMFRLLGSYPAEWFNKGYPAPGEPVKYRTGNVSDMAAGFSFYDCKDGGTIFIGMVGAGNTKKGYPLVGLPTPGDGTDPDFPEGMTGSLKSLPRGQRIEAAITKFCAERTVDEVEAIMNQAGIPNQKAFGPADIEKSAQYAARDDIATWTDSIYGEMKGIGITNKFKKNPAQIVASAPTFGEHSREVLSFLGYTDEQIDDMYAKGITATMDPRETAQLWHLKDWQFFWRDDQAEKLDL

SEQ ID NO: 91 - protein, 452 aa, Unknown
  Description of Unknown: BaiF Pasolli 15265 XieH 2016 YSZC12003 37135 bin.19.fa ALFGHMFB 00323 sequence
MKEIDNKLTQKFDEYPSFGVLKGVKVFVTGTNIAGPFAGCLMAEMGAKVLQAEAPTIACQTRGTLAWSQNHRNEYSITINTASAAGKKIFLKCIEWADIWIEAGRPGSYAKRGLTDEVCWKHNKKLAIVHVSGYGQFGPAKNKPSYDVSGQAMGGYMYMNGVSPTSGPLKVNPYLSDYITAYNACMVALAGYINAKNSGEGDSCDVAQYDTMFRLLDNYPANWFNKGYPQQGEPVPFRTGNKSDQAACFSFYDTKEGNAMFVAIVGQGPVTRGYPIIGMGKPGVTEGIPKNCTGFPLFDPRGKKADELCAKFCAERTCDELEEIFNKAGIPCQRAYGPADIEKDAQYEARENIVEWDDQCFGKMKGIGVTNIFKKNPSQIVASAPCFGEHNREVLKDFGYTDEEIDALYKKGELATWTPADTARIKNFVEWHFFWDPERQAKRIGLEYPPKK

SEQ ID NO: 92 - protein, 455 aa, Unknown
  Description of Unknown: BaiF Pasolli 15265 XieH 2016 YSZC12003 37135 bin.19.fa ALFGHMFB 00324 sequence
MSFKKIDCNLTQKFSEYPDFGVLNGVKVFVSGTAIAGPFAGCLMAEMGAKVLQSEAPKISCGTRGTTSWSQNHRNEYSITCNPRTPAGKKIFKKCLEWADIWIESSKAGTYAKMGLTDEVCWGVNSKLCIVHVSGYGQTGPYKSKASYDVSGQAMGGYMYMNGVSPTDVPLKVNPYLSDYVTAYNACMTALSAYIHALKTGKGESCDVAQYDTMFRLLDNYPVLWYNKGYPKDGEPVPYRTGNHSDLAACFSFYTTKDNKQLFVAINGPGPVEKGYPIIGVGTPGVTPGLPKGIPGFPLNTPMGQKADQALTDFCAQHTCVELEEIFNKVGIPNQRAYEPGDIENDPQYAERENLVEWEDQIFGEMKGIGITNRFKNNPSQIVASAPCFGEHNREVLQEFGYTDKEIDDLYKKGEIVTWTPADTARIRHLPDWGFFWDTERQCERIGMEWPLKDE

SEQ ID NO: 93 - protein, 452 aa, Unknown
  Description of Unknown: BaiF Pasolli 15188 KarlssonFH 2013 S54 bin.27.fa BBGPADBL 00030 sequence
MKVIENKLTQKFNEYPEFGVLKGVKVFVTGTNIAGPFAGCLMAEMGAKVLQAEAPNIACQTRGTLSWSQNHRNEYSITINTASPAGKKIFYKCIEWADIWIEAGRPGSYAKRGLTDKSCWEHNKALTIVHVSGYGQFGPSKDKPSYDVSGQAMGGYMYANGVSPTSSPLKVNPYLSDYITAYNACMVALAGYIGAKASGEGDSCDVAQYDNMFRLLDNYPANWFNRGYPKPGEPVPTRTGNKHDLSCCFSFYDTKDGGAMFVAIVGQGPVERGYPIIGMPKPGTEDVPKNCTGFPLFDPRGKRAEELCEKFCAEHTCDELEEIFTKAGVPCQRAYGPADIEKDPQFEARENIVEWEDECFGRMKGIGVTNIFKKNPSQIVSSAPCFGEHNRDVLSSFGYTDEEIDKLYAKGELVTWTPADTARIKNFVGWNFFWDPERQSKRIGLEYPPKTT

SEQ ID NO: 94 - protein, 460 aa, Unknown
  Description of Unknown: BaiF Pasolli 15188 KarlssonFH 2013 S54 bin.27.fa BBGPADBL 00031 sequence
MNYKEIDCALTHKFNEYPSFGVLEGVNVLVTGTNIAGPFAGQIMAEMGAKVIHSESPKVPCNTRGCTAYSQNHRNEYAITVNPWTPAGKKIFKKLLQWADIWVESSKAGTYARHGYTDDFCWELNEKLCIVHVSGYGQTGPYKGKASYDVSGQAMSGYMYMNGASPTSPPLKVNPYLSDYVTAYNACIAGIASYVHCLKTGKGESADVSQYETMFRILDNYPTLWYNSGYPKHGEPVPYRTGNKSDLAACFSFYKTKDNKQLFVGITGRGPVEKGYPIIGAGVPGTVPDIPKDAAGFPLSAPVGKRVDDLCAKFCSEHTCEELEEIFNELGIPNQRAYDPGDIANDPQFAARENIVEWEDEIFGPMKGIGITNRFKNNPSRIVSSAPCYGEHNREVLQSFGYTEEEIDKLYEKGELRTWTPADTSKHWHLHDWGFFWDVERQCERIGIVPDRKPDGDAKK

SEQ ID NO: 95 - protein, 450 aa, Unknown
  Description of Unknown: BaiF Pasolli 15265 CosteaPI 2017 SID713A074-11-90-0 bin.3.fa BFBJEEJO 00021 sequence
MSTHYKDYYGTHMPFGQFPKFGVLSSVKVLMTGTNIAGPFAASIMAEMGAQVVQVESPNMPCQTRGNYGYSQDHRNTYSITLNTRTAKGKEVLEKLIAWADIWIESGRPGTYAKNGLSDEHMWKINRKLAIVHVSGYGQTGPDKNKAAYDVSGQAMGGYMYMNGTSPTSPPLKVNPYLSDYATAYNACICALSIMTNARITGEGDACDVSQYETMFRLLGSYPAEWFNKGYPGPGEPVKYRTGNVSDIAAGFSFYDCKDGGTIFIGMVGAGNTKKGYPLVGLPTPGDGTDPDFPEGMTGSLKSLPRGQRIEAAITKFCAERTVDEVEAIMNKAGIPNQKAFGPADIEKSAQYAARHDIATWTDSVYGEMKGIGITNKFKKNPAQIVASAPTFGEHSREVLEFLGYTEAQIDDMYAKGVTATMDPRETAILWHLKDWQFFWRDDQAEKLDL

SEQ ID NO: 96 - protein, 432 aa, Unknown
  Description of Unknown: BaiF Pasolli 15210 FengQ 2015 SID531416 bin.49.fa CEDOFBAM 00067 sequence
MAGLKDFPKFGALSGLKILDSGSNIAGPFAGGLLSEAGATVIHFEAPKKPDNQRGWYGYPQNHRNQLSMVADIKTEEGREIFLKLIKWADIWVESSKGGQYDRLGLPDDFLWTINPKLAICHVSGYGQTGVPEYITKASYDAAGQAFSGYMSLNGIDYSLKTNPYLSDYVCGLTTCWSMLACYISTTLTGKGESVDVSQYEALARITDGRFMQYLTDGVKLPRTGNKDAQAASFSFYTCKDGGVIFIGMTGAEVCKRGYPIIGLPVPGTGDPDFPEGFTGWMINTPVGQRIERAVEKFVSEHTVNEVEAALMEAHIPNQKVYELEDCAADPQWQARETLTEWDDPMLGHVKGLGFTSKFKRNPSELWRGAPLFGMDNRDIMRDLGYTDEQIQDYYDRGIVGEFDLETTIKRYRLREVIPHMRPDWKGLPENK

SEQ ID NO: 97 - protein, 433 aa, Unknown
  Description of Unknown: BaiF Pasolli 15209 RaymondF 2016 P21E7 bin.22.fa DDJCLBHB 00373 sequence
MAGLKDFPNNGALHGLKILDSGSNIAGPFAGGLLAEAGATVIHFEAPKKPDNQRGWYGYPQNHRNQLSMVADIKTEEGREIFLKLIKWADIWVESSKGGQYDRLGLPDEFLWTINPKLAICHVSGYGQSGVPEYVTKASYDAAGQAFSGYMSLNGIDYSLKTNPYLSDYVCGLTTCWSMLACYVSTQLTGKGESVDVAQYEALARITDGRFMQYLTDGVKMPRTGNKDAQAASFSFYTCKDGGVIFIGMTGAEVCKRGYPIIGLPVPGTGDPDFPEGFTGWMINSPVGQRIERAVENYVSQHTVNEVEAEMLAHQIPCQKVYELEDCAADPQWQARETLTEWDDPMFGHVKGLGLLSKFKRNPSQIWRGAPLFGMDNRDILHDLGYTDEQIQDYYDRGIVNEFDLETTIKRYRLREVIPHMRPDWKGLPNEKK

SEQ ID NO: 98 - protein, 455 aa, Unknown
  Description of Unknown: BaiF Pasolli 15265 SchirmerM 2016 G89065 bin.22.fa EBDJMKCO 00055 sequence
MSFKKIDCNLTQKFDEYPDFGVLSGVKVFVSGTAIAGPFAGCLMAEMGAKVLQSEAPKISCGTRGTTSWSQNHRNEFSITCNPRTPAGKKIFKKCLEWADIWIESSKAGTYAKMGLTDEVCWGVNSKLCIVHVSGYGQTGPYKNKASYDVSGQAMGGYMYMNGVSPTSTPLKVNPYLSDYVTAYNACMTALSSYIHALKTGKGESCDVAQYDTMFRLLDNYPVLWYNKGYPKDGEPVPYRTGNHSDLAACFSFYTTKDNKQLFVAINGPGPVEKGYPIIGVGTPGVTPGLPKGIPGFPLNTPMGQKADQALTDFCAQHTCAELEEIFSKAGIPNQRAYEPGDIEKDPQYAERENLVEWEDQIFGEMKGIGITNRFKNNPSKIVAAAPCFGEHNREVLKDFGYTDEEINALYKKGEIVTWTPADTARIRHLPDWGFFWDTERQCERIGMEWPLKSE

SEQ ID NO: 99 - protein, 452 aa, Unknown
  Description of Unknown: BaiF Pasolli 15265 SchirmerM 2016 G89065 bin.22.fa EBDJMKCO 00056 sequence
MKEIDNKLTQKFDEYPSFGVLKGVKVFVTGTNIAGPFAGSLMAEMGAKVLQAEAPTIACQTRGTLAWSQNHRNEYSITINSASPAGKKIFLKCIEWADIWIEAGRPGSYAKRGLTDEVCWKHNKKLAIVHVSGYGQFGPSKNKPSYDVSGQAMGGYMYMNGVSPTSGPLKVNPYLSDYITAYNACMVALAGYINAKNSGEGDSCDVAQYDTMFRLLDNYPANWFNKGYPKQGEPVPFRTGNKSDQAACFSFYDTKDGNAMFVAIVGQGPVTRGYPIIGMGKPGVTEGIPKNCTGFPLFDPRGKKADELCAKFCAEHTCDEIEEIFNKAGIPCQRAYGPADIEKDPQYEARENIVEWDDQCFGKMKGIGVTNIFKKNPSQIVASAPCFGEHNREVLKDFGYTDEEIDALYKKGELATWTPADTARIKNFVEWHFFWDPERQAKRIGLEYPPKK

SEQ ID NO: 100 - protein, 432 aa, Unknown
  Description of Unknown: BaiF Pasolli 15211 LouisS 2016 AS60 3 bin.9.fa GHGEBOMP 00331 sequence
MAGLKDFPKFGALSGLKILDSGSNIAGPFAGGLLSEAGATVIHFEAPKKPDNQRGWYGYPQNHRNQLSMVADIKTEEGREIFLKLIKWADIWVESSKGGQYDRLGLSDEFIWSINPKLAICHVSGYGQTGVPEYITKASYDAAGQAFSGYMSLNGIDYALKTNPYLSDYVCGLTTCWSMLACYVSTTLTGKGESVDVSQYEALARITDGRFMQYLTDGVKLPRTGNKDAQAASFSFYTCKDGGVIFIGMTGAEVCKRGYPIIGLPVPGTGDPDFPEGFTGWMINSPVGQRIERAVEKFVSEHTVNEVEAALMAAQIPNQKVYELEDCAADPQWQARETLTEWDDPMLGHVKGLGFTSKFKRNPSELWRGAPLFGMDNRDILRDLGYTDEQVQDFYDRGIVNEFDLETTIKRYRLREVIPHMRPDWKGLPENK

SEQ ID NO: 101 - protein, 450 aa, Unknown
  Description of Unknown: BaiF Pasolli 15211 LouisS 2016 AS60 3 bin.9.fa GHGEBOMP 00341 sequence
MSDHYTDYYGNHMKFDEYPQFGVLSSVKVLMTGTNIAGPYAASMMAEMGAKVVQVEAPKMPCQTRGNYGYSTDHRNTFSVTLNTRSERGRAALEKLIAWADIWIESGRPGAYDKQGLTDEHMWEINPKLAIVHVSGYGQYGPDKDKAAYDVSGQAMGGYMYMNGASPTSPPLKVNPYLSDYATAMMACICALSILTHARATGKGDSVDISQYETMFRLLGSYPTDWFNRGFPGPGEPVKWRTGNVSDLAAGFSFYDCKDGGTIFIGMVGAGNTKKGYPLVGLPTPGDGTDPLFPEGMTGCLRTLPQGQRIEAAITKYCAERTVDEVEAALNELGIPNQKAFGPADILASEQFKAREDIVTWKDSVYGDMKGPGIMNKFKLNPAKLVASAPTFGEHSREILADIGFTEDEINEMYAAGETSTMDPKETAQYWHLKEWGFFWNPDQAKALDL

SEQ ID NO: 102 - protein, 455 aa, Unknown
  Description of Unknown: BaiF Pasolli 15265 Obregon-TitoAJ 2015 SM11 bin.2.fa LFPPKIPJ 00380 sequence
MSFKKIDCKLTQKFNEYPNFGVLNDVKVFVSGTAIAGPFAGCLMAEMGAKVLQSEAPTISCGTRGTTSWSQNHRNEFSITCNPRTPAGKKIFKKCLEWADIWIESSKAGTYARMGLTDEVCWGVNSKLCIVHVSGYGQTGPYKSKASYDVSGQAMGGYMYMNGASPDSPPLKINPYLSDYVTAYNACMTALSAYVHALKTGKGESCDVAQYDTMFRLLDNYPVLWYNKGYPKDGEPVPYRTGNHSDLAACFSFYTTKDNKQLFVAINGPGPVEKGYPIIGVGTPGVTPGLPKGIPGYPLNTPMGQKADAALTKFCAEHTCDELEEIFNKVNIPNQRAYEPADIENDPQYAERENLVEWEDQIFGDMKGIGITNRFKNNPSQIVASAPCFGEHNREVLQSFGYSDEEIDALYKKGEIVTWTPADTARIRHLPDWGFFWDTERQCERIGMEWPLENK

SEQ ID NO: 103 - protein, 452 aa, Unknown
  Description of Unknown: BaiF Pasolli 15265 Obregon-TitoAJ 2015 SM11 bin.2.fa LFPPKIPJ 00381 sequence
MKEIDNKLTQKFSEYPEFGVLKGVKVFVTGTNIAGPFAGSLMAEMGAKVLQAEAPTIACQTRGTLAWSQNHRNEYSITINSATPAGKKIFLKCIEWADIWIEAGRPGSYAKRGLTDEVCWKHNKALSIVHVSGYGQFGPSKNKPSYDVSGQAMGGYMYMNGVSPTSGPLKVNPYLSDYITAYNACICAMAGYINAKNSGEGDSCDVAQYDTMFRLLDNYPANWFNKGYPKQGDPVPYRTGNKSDQAACFSFYDTKDSNAMFVAIVGQGPVERGYPIIGMPKPGTTPEVPKECTGFPLFDPRGQKAEELCAKFCAERTCDELEEIFNKAGIPCQRAYGPADIEKDPQYEARENIVEWDDQCFGRMKGIGVTNIFKKNPSQIVASAPCFGEHNREVLESFGYTDEEIDALYKKGELATWTPAETAKRKNFVEWHFFWDPERQAKRIGLDYPPKK

SEQ ID NO: 104 - protein, 450 aa, Unknown
  Description of Unknown: BaiF Pasolli 15265 Obregon-TitoAJ 2015 SM11 bin.2.fa LFPPKIPJ 00411 sequence
MSTRYTDYYGTHMPFANFPKFGVLSSVKVLMTGTNIAGPFAASIMAEMGAQVVQVESPNMPCQTRGNYGYSQDHRNTYSITLNTRTPKGKEVLEKLIAWADIWIESGRPGTYAKAGLSDEHMWKINRKLAIVHVSGYGQTGPDKNKAAYDVSGQAMGGYMYMNGTSPTSPPLKVNPYLSDYATAYNACICALSIMTNARITGEGDSCDVSQYETMFRLLGSYPAEWFNKGYPGPGEPVKYRTGNVSDIAAGFSFYDCKDGGTIFIGMVGAGNTKKGYPLVGLPTPGDGTDPDFPEGMTGSLKSLPRGQRIEAAITKFCAERTVDEVEAILNKAGIPNQKAFGPADIENSAQYAAREDIATWTDSVYGEMKGIGITNKFKKNPAQIVASAPTFGEHSREVLEFLGYSDAQIDDMYAKGVTATMDPRETAIQWHLKDWQFFWRDDQAEKLDL

SEQ ID NO: 105 - protein, 452 aa, Unknown
  Description of Unknown: BaiF Pasolli 15002 LiJ 2014 V1.FI04 bin.94.fa MJMNNJHI 01030 sequence
MKVIHNKLNQKFNEYPDFGVLKGVKVFITATNIAGPFAGCLMAEMGAKVLQAESPDIACQTRGTLAWAQNHRNEYSITINTNTARGKEIFLKCIEWADIWIEAGRPGSYAKRGLTDEVCWKHNKRLAIVHVSGYGQFGPYKNKASYDVSGQAMGGYMYTNGESPTSPPLKVNPYLSDFVTAYNVCITALAGYINAKNSGEGDSCDVAMYDTMFRLLDNYPANWYNRGYPKPGEPVPYRTGNKSDQAACFSFYETKDNNTIFVAIVGQGPVERGFPIIGMPKPGTGDVPLKCTGFPIFDPRGQRADALLAKFCKERTCDELEEIFTKANIPVQRSYGPADIEKDPQYEARENLVEWEDQCFGMMKGIGVTNVFKKNPSQIICAAPCFGEHNRDVLTEFGYSEEEIDAMYKKGELATWTPKDTAINKNYIEWHFFWDPERQAKRIGMDYPPKKK

SEQ ID NO: 106 - protein, 451 aa, Unknown
  Description of Unknown: BaiF Pasolli 15002 LiJ 2014 V1.FI04 bin.94.fa MJMNNJHI 01038 sequence
MSDGKNFKDYYGTHMAFDQFPKFGVLSDVKVVMTGVNIAGPFAATMMAEMGAQVIQVEPPNMPSSQRGTYGQAQDARNCFSVPLNVRSPRGKKAFEKIIRWADIWIESGRPGNYKKMGLSDAHMWELNPKLAIVHISGYGQYGPDKDRAAYDVSGQAMGGYMYMNGVSPTSPPLKVNPFLSDYATAFQACICALAILTHARATGQGDSVDVSQYETMFRLLSQYPFDWFNRGFPAEGEPVKWRTGNKSDKAAAFSFYDCKDGTIFIGMNGPNVVKRGYPLIGLPTPGDGTDPDFFEGMSGSLIQLPVGQRIERALEKFCAERTVDEVEKIMNENGIPNQRPFGPADILKSEQYKAREDIITWTDSVYGEVTGIGIMNKFKRNPSKVVASAPLLGEHTREVMSFLGMSEEEIDALYKHGDTTTMDARETAQFWHLKEWQFFWNKEQAEKLDL

SEQ ID NO: 107 - protein, 455 aa, Unknown
  Description of Unknown: BaiF Pasolli 15004 FengQ 2015 SID31866 bin.65.fa NCFGPKLH 00810 sequence
MEVKKIENKLTQKFNEYPQFGVLQGVKVFVTGTNIAGPFAGSLMAEMGAQVLQAEAPNIACQTRGTLAWAQNHRNEYSITLNTATPRGKKIFLKCIEWADIWIEAGRPGNYAKRGLSDEVVWSHNKALSIVHVSGYGQTGPAKDKASYDVSGQAMGGYMYMNGASPTSTPLKVNPYISDFITAYNACIVALSGYIHAKNTGEGDSCDVAQYDTMFRLLDNYPATWFNAGYPKPGDPVPYRTGNKSDQACCFSFYDTKDGNAMFVAIVGQGPVERGYPIIGMPKPGTGDVPAKCTGFPLFDPRGKRAEALCEKFCAEHTCDELEEIFNKAGIPNQRCYGPADIEKDPQYAARENIVEWEDQCFGPMKGIGLINRFKKNPSQVVASAPCFGEHNRDVLTTFGYSEEEINDMYKKGEMVTWTPKDTAINKNYVQWRFFWDPERQSKRIGLEYPPKGTL

SEQ ID NO: 108 - protein, 452 aa, Unknown
  Description of Unknown: BaiF Pasolli 15005 LiJ 2014 MH0358 bin.56.fa NPCPOAJM 00305 sequence
MKVIENKLTQKFNEYPEFGVLKGVKVFVTGTNIAGPFAGCLMAEMGAKVLQAEAPNIACQTRGTYSWAQNHRNEYSITINSSSPAGKKIFYKCIEWADIWIEAGRPGSYAKRGLTDKSCWEKNPKLTIVHVSGYGQFGPSKDKPSYDVSGQAMGGYMYMNGVSPTSSPLKVNPYLSDYVTAYNACMVALAGYINAQHTGEGDSCDVAQYDNMFRLLDEYPARWYNKGYPKPGEPVPTRTGNKSDQACCFSFYDTKDGGAMFVAIVGQGPVERGYPIIGMPKPGTGDVPAKCTGFPLFDPRGQRGEKLCEEFCAAHTCDELEEIFNAAGIPCQRAYGPEDILNDPQFEARENLVEWEDQCYGPMKGMGPVNIFKKNPSQIVAAAPCFGEHNREVLSEFGYTDEEIDKLYAKGEIATWTAKDTAINKNYATWGFFWDPERQCKRLGIDYPPVKK

SEQ ID NO: 109 - protein, 455 aa, Unknown
  Description of Unknown: BaiF Pasolli 15265 LiuW 2016 SRR3992994 bin.12.fa OBMFBIGE 00756 sequence
MSFKKIDCNLTQKFSEYPDFGVLNGVKVFVSGTAIAGPFAGCLMAEMGAKVLQSEAPKISCGTRGTTSWSQNHRNEYSITCNPRTPAGKKIFKKCLEWADIWIESSKAGTYAKMGLTDEVCWGVNSKLCIVHVSGYGQTGPYKSKASYDVSGQAMGGYMYMNGVSPTDVPLKVNPYLSDYVTAYNACMTALSAYIHALKTGKGESCDVAQYDTMFRLLDNYPVLWYNKGYPKDGEPVPYRTGNHSDLAACFSFYTTKDNKQLFVAINGPGPVEKGYPIIGVGTPGVTPGLPKGIPGFPLNTPMGQKADQALTDFCAKHTCAELEEIFNKVGIPNQRAYEPGDIENDPQYAERENLVEWEDQIFGEMKGIGITNRFKNNPSQIVASAPCFGEHNREVLQEFGYTDKEIDDLYKKGEIVTWTPADTARIRHLPDWGFFWDTERQCERIGMEWPLKDE

SEQ ID NO: 110 - protein, 452 aa, Unknown
  Description of Unknown: BaiF Pasolli 15265 LiuW 2016 SRR3992994 bin.12.fa OBMFBIGE 00757 sequence
MKEIDNKLTQKFDEYPSFGVLKGVKVFVTGTNIAGPFAGCLMAEMGAKVLQAEAPTIACQTRGTLAWSQNHRNEYSITINSASPAGKKIFLKCVEWADIWIEAGRPGSYAKRGLTDEVCWKHNKKLAIVHVSGYGQFGPAKNKPSYDVSGQAMGGYMYMNGVSPTSGPLKVNPYLSDYITAYNACMVALAGYINAKNSGEGDSCDVAQYDTMFRLLDNYPANWFNKGYPKQGEPVPFRTGNKSDQAACFSFYDTKEGNAMFVAIVGQGPVTRGYPIIGMGKPGVTEGIPKNCTGFPLFDPRGKKADELCAKFCAEHTCDEIEEIFNKAGIPCQRAYGPADIEKDPQYEARENIVEWDDQCFGKMKGIGVTNIFKKNPSQIVASAPCFGEHNREVLKDFGYTDEEIDALYKKGELATWTPADTARIKNFVEWHFFWDPERQAKRIGLEYPPKK

SEQ ID NO: 111 - protein, 450 aa, Unknown
  Description of Unknown: BaiF Pasolli 15265 LiuW 2016 SRR3992994 bin.12.fa OBMFBIGE 01172 sequence
MSTHYKDYYGTHMPFGQFPKFGVLSSVKVLMTGTNIAGPFAASIMAEMGAQVVQVESPNMPCQTRGNYGYSQDHRNTYSITLNTRTAKGKEVLEKLIAWADIWIESGRPGTYAKNGLSDEHMWKINRKLAIVHVSGYGQTGPDKNKAAYDVSGQAMGGYMYMNGTSPTSPPLKVNPYLSDYATAYNACICALSIMTNARITGEGDACDVSQYETMFRLLGSYPAEWFNKGYPGPGEPVKYRTGNVSDIAAGFSFYDCKDGGTIFIGMVGAGNTKKGYPLVGLPTPGDGTDPDFPEGMTGSLKSLPRGQRIEAAITKFCAERTVDEVEAIMNKAGIPNQKAFGPADIEKSAQYAARHDIATWTDSVYGEMKGIGITNKFKKNPAQIVASAPTFGEHSREVLEFLGYTEAQIDDMYAKGVTATMDPRETAIQWHLKDWQFFWRDDQAEKLDL

SEQ ID NO: 112 - protein, 456 aa, Unknown
  Description of Unknown: BaiF Pasolli 4621 Obregon-TitoAJ 2015 NO11 bin.28.fa ODBMCAMJ 01956 sequence
MKQIDNKLTQKFDEYPQFGVLQGVKVFVTGTNIAGPFAGCLMAEMGAQVLQAESPSIACQTRGTLSWSQNHRNEYSITINTAKASGRKIFYKCVEWADIWIEAGKPGSYAKRGITDKSCWEHNKALTIVHVSGYGQFGPSKDKPSYDVSGQAMGGYMYLNGPSPTSSPLKVNPYLSDYVTAYNACIVALSGYINAQRTGEGDSCDVAQYDTMFRLLDNYPARWFNNGYPKQGEPVPERTGNKSDMAACFSFYDTKDGNTIFVAITGQGPVTRGYPIIGMGKPGVAKDIPKDCTGFPLFDPRGQKADKLLTEFCASHTCDELEEIFNKAGIPCQRAYGPADIEKDPQYEARENLVEWEDQCFGRMKGIGITNIFKKNPSQIVASAPCFGEHNREVLQYFGYTDEEIDKLYKNKDIVTWTPAETAKRKLFVEWGFFWDPERQAKRIGLEYPPKKKTKK

SEQ ID NO: 113 - protein, 451 aa, Unknown
  Description of Unknown: BaiF Pasolli 15003 XieH 2016 YSZC12003 35390 bin.5.fa PIKIEFGP 00586 sequence
MKVINNKLTHKFTEYPDFGVLKGVKVFITGTNIAGPFAGCLMAEMGAKVLQAEAPNIACQTRGTLAWAQNHRNEFSITLNTATPRGKKIFLKCIEWADIWIEAGRPGSYEKRGLSDEVCWKHNKALTIVHVSGYGQFGPAKNKASYDVSGQAMGGYMYLNGVSPTSGPLKVNPYLSDFVTAYNVCMVSLAGYINAQHTGEGDSCDVAQYDTMFRLLDNYPANWFNKGYPKQGEPVPFRTGNKSDQAACFSFYDTKEGNAMFVAIVGQGPVERGYPIIGMPKPGTGDVPLKCTGFPLFDPRGKRAEELCTKFCAEHTCDELEEIFTKAGIPCQRCYGPADIEKDPQYAARENIVEWEDQCFGPMKGIGVTNIFKKNPSQIYAAAPCFGEHNREVLTEFGYSEEEIEDMYKKGEMATWTPKDTAINKNYVEWRFFWDPERQAKRIGMDYPPKR

SEQ ID NO: 114 - protein, 426 aa, Clostridium hiranonis
MAGLKDFPKFGALSGLKILDSGSNIAGPLGGGLLAECGATVIHFEGPKKPDNQRGWYGYPQNHRNQLSMVADIKSEEGRKIFLDLIKWADIWVESSKGGQYDRLGLSDEVIWSVNPKIAIVHVSGYGQVGDPSYVTKASYDAVGQAFSGYMSLNGVNEALKINPYLSDFVCGLTTCWAMLACYVSTQLTGKGESVDVAQYEALARIMDGRMIQYATDGVSVPKTGNKDAQAALFSFYTCKDGRTIFIGMTGAEVCKRGFPIIGLPVPGTGDPDFPEGFTGWMIDTPVGQRMEKAMEAFVAERTMPEVEKAMIDAQIPCQRVYDLEDCLNDPHWNARGTIMEWDDPMMGHIKGLGLINKFKNNPSEIWRGAPLFGMDNRDILRDLGYSEEEVNDLYAKGIVNEFDLETTIKRYKLDQVIPHMAKKDK

SEQ ID NO: 115 - protein, 455 aa, Unknown
  Description of Unknown: BaiF Pasolli 15265 ERR1620327 bin.47 BPCKCDAK 00024 sequence
MSFKKIDCNLTQKFSEYPDFGVLNGVKVFVSGTAIAGPFAGCLMAEMGAKVLQSEAPKISCGTRGTTSWSQNHRNEYSITCNPRTPAGKKIFKKCLEWADIWIESSKAGTYAKMGLTDEVCWGVNSKLCIVHVSGYGQTGPYKSKASYDVSGQAMGGYMYMNGVSPTDVPLKVNPYLSDYVTAYNACMTALSAYIHALKTGKGESCDVAQYDTMFRLLDNYPVLWYNKGYPKDGEPVPYRTGNHSDLAACFSFYTTKDNKQLFVAINGPGPVEKGYPIIGVGTPGVTPGLPKGIPGFPLNTPMGQKADQALTDFCAQHTCAELEEIFNKVGIPNQRAYEPGDIENDPQYAERENLVEWEDQIFGEMKGIGITNRFKNNPSQIVASAPCFGEHNREVLQEFGYTDKEIDDLYKKGEIVTWTPADTARIRHLPDWGFFWDTERQCERIGMEWPLKGE

SEQ ID NO: 116 - protein, 452 aa, Unknown
  Description of Unknown: BaiF Pasolli 15265 ERR1620327 bin.47 BPCKCDAK 00025 sequence
MKEIDNKLTQKFDEYPSFGVLKGVKVFVTGTNIAGPFAGCLMAEMGAKVLQAEAPTIACQTRGTLAWSQNHRNEYSITINSASPAGKKIFLKCIEWADIWIEAGRPGSYAKRGLTDEVCWKHNKKLAIVHVSGYGQFGPSKNKPSYDVSGQAMGGYMYMNGVSPTSGPLKVNPYLSDYITAYNACMVALAGYINAKNSGEGDSCDVAQYDTMFRLLDNYPANWFNKGYPQQGEPVPFRTGNKSDQAACFSFYDTKEGNAMFVAIVGQGPVTRGYPIIGMGKPGVTEGIPKNCTGFPLFDPRGKKADELCAKFCAERTCDELEEIFNKAGIPCQRAYGPADIEKDPQYEARENIVEWDDQCFGKMKGIGVTNIFKKNPSQIVASAPCFGEHNREVLKDFGYTDEEIDALYKKGELATWTPADTARIKNFVEWHFFWDPERQAKRIGLEYPPKK

SEQ ID NO: 117 - protein, 450 aa, Unknown
  Description of Unknown: BaiF Pasolli 15265 ERR1620327 bin.47 BPCKCDAK 00052 sequence
MSTHYKDYYGTHMPFDQFPKFGVLSSVKVLMTGTNIAGPFAASIMAEMGAQVIQVEAPNMPCQTRGNYGYSQDHRNTYSITLNTRTAKGREVLEKLIAWADIWIESGRPGTYAKNGLSDEHMWKINRKLAIVHVSGYGQTGPDRNKAAYDVSGQAMGGYMYMNGTSPTSPPLKVNPYLSDYATAYNACICALSIMTNARITGEGDACDVSQYETMFRLLGSYPAEWFNKGYPAPGEPVKYRTGNVSDMAAGFSFYDCKDGGTIFIGMVGAGNTKKGYPLVGLPTPGDGTDPDFPEGMTGSLKSLPRGQRIEAAITKFCAERTVDEVEAIMNQAGIPNQKAFGPADIEKSAQYAARDDIATWTDSIYGEMKGIGITNKFKKNPAQIVASAPTFGEHSREVLAFLGYTDEQIDDMYAKGITATMDPRETAQLWHLKDWQFFWRDDQAEKLDL

SEQ ID NO: 118 - protein, 454 aa, Eubacterium sp.
MKEINNKLTQKFDEYPTFGVLQGVKVFVTGTNIAGPFAGSLMAEMGAKVLQAEAPSIACQTRGTLAWSQNHRNEYSITINVAKKSGQKIFLKCIEWADIWIEAGRPGSYAKRGLTDKVCWEHNKKLSIVHVSGYGQFGPSKDKPSYDVSGQAMGGYMYMNGVSPTSGPLKVNPYLSDYITAYNACIAAMAGYIGAQNTGEGDSCDVAQYDTMFRLLDNYPANWFNKGYPKQGEPVPYRTGNKSDMASCFSFYDTKDGGAMFVAIVGQGPVKRGYPIIGMGKPGITKGIPKNCTGFPLFDPRGKQADELCAKFCAERTCDELEEIFNKAAIPCQRAYGPADIEKDPQYEARENIVEWEDQCFGKMKGIGLTNIFKKHPSQIVAAAPCFGEHNREVLESFGYTKEEIDAMYDKGDLVTWTPADTARIKNFVEWNFFWDPENQAKRIGLEYPPKKDK

SEQ ID NO: 119 - protein, 452 aa, Unknown; identical to SEQ ID NO: 116
  Description of Unknown: BaiF Pasolli 15265 ERR1018244 bin.34 GIGKKEJC 00812 sequence

SEQ ID NO: 120 - protein, 455 aa, Unknown
  Description of Unknown: BaiF Pasolli 15265 ERR1018244 bin.34 GIGKKEJC 00813 sequence
MSFKKIDCNLTQKFSEYPDFGVLNGVKVFVSGTAIAGPFAGCLMAEMGAKVLQSEAPKISCGTRGTTSWSQNHRNEYSITCNPRTPAGKKIFKKCLEWADIWIESSKAGTYAKMGLTDEVCWGVNSKLCIVHVSGYGQTGPYKSKASYDVSGQAMGGYMYMNGVSPTDVPLKVNPYLSDYVTAYNACMTALSAYIHALKTGKGESCDVAQYDTMFRLLDNYPVLWYNKGYPKDGEPVPYRTGNHSDLAACFSFYTTKDNKQLFVAINGPGPVEKGYPIIGVGTPGVTPGLPKGIPGFPLNTPMGQKADQALTDFCAQHTCAELEEIFNKVGIPNQRAYEPGDIENDPQYAERENLVEWEDQIFGEMKGIGITNRFKNNPSQIVASAPCFGEHNREVLQEFGYTDKEIDDLYKKGEIVTWTPADTARIRHLPDWGFFWDTERQCERIGMEWPLKDE

SEQ ID NO: 121 - protein, 455 aa, Unknown
  Description of Unknown: BaiF Pasolli 15265 ERR1578621 bin.18 HPOHBHHF 00900 sequence
MSFKKIDCNLTQKFSEYPDFGVLNGVKVFVSGTAIAGPFAGCLMAEMGAKVLQSEAPKISCGTRGTTSWSQNHRNEYSITCNPRTPAGKKIFKKCLEWADIWIESSKAGTYAKMGLTDEVCWGVNSKLCIVHVSGYGQTGPYKSKASYDVSGQAMGGYMYMNGVSPTDVPLKVNPYLSDYVTAYNACMTALSAYIHALKTGKGESCDVAQYDTMFRLLDNYPVLWYNKGYPKDGEPVPYRTGNHSDLAACFSFYTTKDNKQLFVAINGPGPVEKGYPIIGVGTPGVTPGLPKGIPGFPLNTPMGQKADQALADFCAQHTCVELEEIFNKVGIPNQRAYEPGDIENDPQYAERENLVEWEDQIFGEMKGIGITNRFKNNPSQIVASAPCFGEHNREVLQEFGYTDKEIDDLYKKGEIVTWTPADTARIRHLPDWGFFWDTERQCERIGMEWPLKDE

SEQ ID NO: 122 - protein, 452 aa, Unknown
  Description of Unknown: BaiF Pasolli 15265 ERR1578621 bin.18 HPOHBHHF 00901 sequence
MKEIDNKLTQKFDEYPSFGVLKGVKVFVTGTNIAGPFAGCLMAEMGAKVLQAEAPTIACQTRGTLAWSQNHRNEYSITINTASAAGKKIFLKCIEWADIWIEAGRPGSYAKRGLTDEVCWKHNKKLAIVHVSGYGQFGPAKNKPSYDVSGQAMGGYMYMNGVSPTSGPLKVNPYLSDYITAYNACMVALAGYINAKNSGEGDSCDVAQYDTMFRLLDNYPANWFNKGYPQQGEPVPFRTGNKSDQAACFSFYDTKEGNAMFVAIVGQGPVTRGYPIIGMGKPGVTEGIPKNCTGFPLFDPRGKKADELCAKFCAERTCDELEEIFNKAGIPCQRAYGPADIEKDPQYEARENIVEWDDQCFGKMKGIGVTNIFKKNPSQIVASAPCFGEHNREVLKDFGYTDEEIDALYKKGELATWTPADTARIKNFVEWHFFWDPERQAKRIGLEYPPKK

SEQ ID NO: 123 - protein, 450 aa, Unknown
  Description of Unknown: BaiF Pasolli 15265 ERR1578621 bin.18 HPOHBHHF 01120 sequence
MSTQYKDYYGTHMPFGQFPKFGVLSSVKVLMTGTNIAGPFAASIMAEMGAQVIQVEAPNMPCQTRGNYGYSQDHRNTYSITLNTRTAKGREVLEKLIAWADIWIESGRPGTYAKNGLSDEHMWKINRKLAIVHVSGYGQTGPDRNKAAYDVSGQAMGGYMYMNGTSPTSPPLKVNPYLSDYATAYNACICALSIMTNARITGEGDACDVSQYETMFRLLGSYPAEWFNKGYPAPGEPVKYRTGNVSDMAAGFSFYDCKDGGTIFIGMVGAGNTKKGYPLVGLPTPGDGTDPDFPEGMTGSLKSLPRGQRIEAAITKFCAERTVDEVEAIMNQAGIPNQKAFGPADIEKSAQYAARDDIATWTDSIYGEMKGIGITNKFKKNPAQIVASAPTFGEHSREVLSFLGYTDEQIDDMYAKGITATMDPRETAQLWHLKDWQFFWRDDQAEKLGL

SEQ ID NO: 124 - protein, 452 aa, Unknown; identical to SEQ ID NO: 108
  Description of Unknown: BaiF Pasolli 15005 ERR414305 bin.35 IEHPGPHH 00307 sequence

SEQ ID NO: 125 - protein, 456 aa, Unknown; identical to SEQ ID NO: 112
  Description of Unknown: BaiF Pasolli 4621 SRR2726241 bin.48 LDBMBPGB 00671 sequence

SEQ ID NO: 126 - protein, 473 aa, Unknown
  Description of Unknown: BaiG Pasolli 15265 XieH 2016 YSZC12003 37135 bin.19.fa ALFGHMFB 00322 sequence
MENNKNYMKGFVPYAVAAAILSLCGGFTASVPTAISTAWNADASLTFITLAYSLAAAAMAPIMGKLGGAIGRRKMLLGAMALYTVGQALIAICPQNVPLLLVFRFMVGIGAAGIAPVVMSYIMMEFPPEKMGQGFTIYMALACGMVIFGPTLGGIVMKVIGTASAWRIVMWICVALCVISFLICFAKVKDNPNIPKGSMKGFDWAGAVFVLLMFGALVCVPTFGQQNGWASAATLASIGVAVVGLIVLFLVEKKAASPILNGKFIARKNFVLPVLIMFLTQGLMTACLTEVIRFGYAIDKATVAAVAMSIEYLGMAIGTIVLGPMADKKEPKIVAAIALVFVAIGSLIMLFIGENAGILMMGGALFFVGLGLGGNTTIFMKVALSGVAPAESSSASGTFNVFKDMCAPFGVAIFVPMFVTGMTKKAATGMAVPAAAASALHSVALVQLICVVVGIVVCFLIPSVHKKAEAAKE

SEQ ID NO: 127 - protein, 470 aa, Unknown
  Description of Unknown: BaiG Pasolli 15188 KarlssonFH 2013 S54 bin.27.fa BBGPADBL 00029 sequence
MENKSYMKGFVPYAIAAAVLSLCGGFTASVPTAISTAWNADASLTFITLAYSLAAAAMAPIMGKLGGPLGRRKLLLISMGLYTIGQLLIAICPANIPLLLVFRFMVGIGAAGIAPVVMAYIMMEFPPEKMGQGFTIYMALACGMVIFGPTLGGIVMAVIGTADAWRTVMWICVALCAISFVLCFIKVKDNPNLPKTSMKGFDWAGAVFVLFMFGALVCIPTFGQQNGWGSVYTLIAIAVAVISLIILFAVEKKNASPILNGKFIARKNFILPVVVLFLTQGLMTACLTEVIRFGYAIDKASVASVAMSIEYVGMAIGTIVLGPMADKKEPRVVAAVALLFVALGSVIMMFIGENAGILSMGGALFFVGLGLGGNTTIFMKVALSGVAPAESSSASGTFNVFKDMCAPFGVAIFVPMFVTGMTNKAASGMAVPAAATSALHTVALVQLICVVVGIVVCFMLPAIHAKKEEA

SEQ ID NO: 128 - protein, 473 aa, Unknown
  Description of Unknown: BaiG Pasolli 15210 FengQ 2015 SID531416 bin.49.fa CEDOFBAM 00071 sequence
MDATVNKNYMKGFVPFAMAAALVSLAGGFTASIPNNIVSAWGLDSSWVTWITLAMSMGMAACAPVLGKLGDIFGRRGAALVGMALMAIGELAIGMAPDGAIWMVLVARFVVGIGAAAISPTVIAYITSEFPPVKMGNGFAVYMALSSGMVIFGPTVGGLIFQATQNWRLILYICAGLAALCFVICLFTMKKETGPKKGIAGFDIFGGIFIILGFSLVLCVPTVGQGDGGWFSPASLTVIGCTVLALVILFLVERKAKNPILNGKFMARKEFILPVVVLFLTQGLMQACMTNTIRFSMMFDPTSSVASFATSIMYVGMTIGNIAVAPLSNKHEPRYISVLALVFCLIGAAIQLLFTAESGFVLFAASLFFIGLGLGGNGTIFMKVALSGLDPQIAGAGSGTYTVFRDMSAPFGVAVFSSMFVGGYAAAQQAGDAAALGAAVVSSMHNVAWAQMACVVVGMIVCLMLPKIYSKKS

SEQ ID NO: 129 - protein, 473 aa, Unknown
  Description of Unknown: BaiG Pasolli 15209 RaymondF 2016 P21E7 bin.22.fa DDJCLBHB 00377 sequence
MDATVNKNYMKGFVPFAMAAALVSLAGGFTASIPNNIVSAWGLDSSWVTWITLSMSMGMAACAPVLGKLGDIFGRRGAALVGMALMAIGELAIGLAPDGAIWMVLVARFVVGIGAAAISPTVIAYITSEFPPVKMGNGFAVYMALSSGMVIFGPTVGGIIFQATQNWRLILYICAALAALCFVICLFTMKKETGPKKGIAGFDIFGGIFIILGFSLVLCVPTVGQGDGGWLSPASLTVIGCTVVALVILFLVERKAKNPILNGKFMARKEFILPVVVLFLTQGLMQACMTNTIRFSMMFDPTSSVASFATSIMYVGMTIGNIAVAPLSNKHEPRYISVLALVFCLIGAAIQLLFTAESGFVLFASSLFFIGLGLGGNGTIFMKVALSGLDPQIAGAGSGTYTVFRDMSAPFGVAVFSSMFVGGYAAAQQAGDAAALGAAVVSSMHNVAWVQMACVVVGMVVCLMLPKIYSKKS

SEQ ID NO: 130 - protein, 473 aa, Unknown
  Description of Unknown: BaiG Pasolli 15265 SchirmerM 2016 G89065 bin.22.fa EBDJMKCO 00057 sequence
MENNKSYMKGFVPYAIAAAILSLCGGFTASVPTAISTAWNADASLTFITLAYSLAAAAMAPILGKLGGVIGRRKMLLSAMGLYTVGQALIAICPQNIPLLLVFRFMVGIGAAGIAPVVMSYIMMEFPPEKMGQGFTIYMAVACGMVIFGPTVGGIVMKVIGTANAWRIVMWICVALCVITFLICMAKVKDNPNIPKGTMQGFDWAGAVFVLLMFGAFVCVPTFGQQNGWGSVTTLVSMAVAVVALIILFMVEKKASSPILNGKFMARKNFVLPVLVMLLTQGLMTACLTEIIRFGYAIDKATVASVAMSIEYIGMAIGTVILGPMADKKEPKVVAAIALVFVAIGSLIMLFIGENAGILQMGGALFFVGLGIGGNGTIFMKVALSGVAPAESSSASGTYNVFRDMTAPFGVAIFVPMFVTGMSKKAAAGMAVPAAAAGSLHSVALVQLACVIVGIVVCFLIPSVHKKADAAKE

SEQ ID NO: 131 - protein, 470 aa, Unknown
  Description of Unknown: BaiG Pasolli 15211 LouisS 2016 AS60 3 bin.9.fa GHGEBOMP 00327 sequence
MDATVNKNYMKGFIPFAMAAALVSLAGGFTASIPNNIVSDWQLDPSWLTWITLSMSMGMAACAPVLGKLGDIFGRRGASLVGMALMAIGELVIGIAPDGMVWMVIIGRFVVGVGAAAISPTVIAYITSEFPPAKMGNGFAVYAALSSGMVIFGPTIGGIIFQTTQNWRLILYICAALAALCFVVGLFTMKKETGPKKGMSGFDVFGGIFIILFFSLALCVPNLAQGTAGWLGTSTLVVLGAAVVCLVILFVAEKKAKNPILNGKFMARKQFILPVVVLFLTQGLMQACMTNTIRFAMMFDPTTSVASYATSIMYVGMTIGNIVVAPLANKKEPRIVSVCALVFCLIGAALQLLYTAESGFVMFAASLFFIGLGLGGNTTIFMNVALSGLDPQIAGAGSGTYTVFRDLSAPFGVAVFVPMFTNAIQYEASGAPVATSIVTSMHSVAWVQIVCVVVGMVVCLLLPKIHNKKA

SEQ ID NO: 132 - protein, 473 aa, Unknown
  Description of Unknown: BaiG Pasolli 15202 Bengtsson-PalmeJ 2015 TRAVELRES21 bin.108.fa KLDDHOPD 00156 sequence
MDATVNKNYKKGFVPFAMAAALVSLAGGFTATIPNNIVSSWGLDDSWLTWITLAMSMGMAACAPVLGKLGDIFGRRGAALFGMAVMVVGELGLGLAPNGAVWMAILFRFVIGVGAAAISPTVIAYITSEFPPAKMGTGFAVYMALSSGMVIFGPTIGGIIVQTTQNYRIILYICAVLAAACFVVGLFTMPKETGPKKGFAGFDIFGGIFIILFFSLALCVPNLAQGEAGWFGKSTLIVIAATIVCLVVLVFAEKKAKNPILNGKFMARKQFILPVVVLFLTQGLMQACMTNTIRFTMILDPTSAVGNYATSILYVGMTIGNIAVAPLASKKEPRYISAFALVFCLIGAAIQLLYTAESGFIVFAASLFFVGLGLGGNGTIFMNVALSGLDPKIAGAGSGTYTVFRDLSAPFGVAVFCPMFVAGYSAAMATGDSVRIAADLVSSMHNVAWVQMGCVVAGMIVCLMIPKIHNKNA

SEQ ID NO: 133 - protein, 473 aa, Unknown
  Description of Unknown: BaiG Pasolli 15004 FengQ 2015 SID31866 bin.65.fa NCFGPKLH 00811 sequence
MENTNKSYMKGFVPYAIAAAILSLCGGFTASVPTAISTAWNADASLTFITLAYSLAAAAMAPIMGKLGGAIGRRKMLLSAMALYTVGQALIAICPQNVPLLLVFRFMVGIGAAGIAPVIMAYIMMEFPPEKMGLGFTIYMVLSCGMVIFGPTVGGILMAVIGTADAWRIIMWICVAMCVISFVLCFAMVKDNPNLPKGSMKGFDWAGAAFVLIMFGALVCVPTFGQQNGWMSVATLASIAVAVVGLIILVAIEKKAASPILNGKFIARKNFVLPVIVLFLTQGLMTACLTEIIRFGYAIDKASVASIAMSIEYLGMAIGTVVLGPMADKKEPRIVAAIALVFVAIGSAIMMIINENAGVLAMGGALFFVGLGLGGNTTIFMKVALSGVAPTESSSASGTFNVFKDMCAPFGVAIFVPMFVTGMTNKAAAGMAVPAAAASALHSVALVQLVCVAVGIVVCFMLPSVRVKTAKED

SEQ ID NO: 134 - protein, 471 aa, Unknown
  Description of Unknown: BaiG Pasolli 15005 LiJ 2014 MH0358 bin.56.fa NPCPOAJM 00306 sequence
MENKSYMKGFVPYAIAAAVLSLCGGFTASVPSAISQAWNASDSLTFITLAYSLAAAAMAPIMGKLGGAIGRRKMLLAAMGLYTVGQALIAICPANIPMLLVFRFMVGIGAAGIAPVIMAYIMMEFPPEKMGQGFTIYMALSCGMVIFGPTVGGIVMAAIGTADAWRIVMWICVAMCVISFVLCAAMVRDNPNIPKGSMKGFDWAGAVFVLVMFGALVCVPTFGQQSGWAATTTLVSIAAAVVGLIILVFVEKKAATPILSGKFIFRKNFILPVVVLFLTQGLMTACLTEMIYFGMSIGKATIASIAMSIEYLGMAIGTIVLGPMSDKKEPKVVAAVALVFVAIGSAIMLLINESAGVLAMGGALFFIGLGLGGNVTIFMKVALFGVAPTESSSASGTFNVFKDMCAPFGVAIFVPMFVTGMNTRAAAGMEVPVAATSSLHTVAIVQLVCVVVGIVICFLLPSVRAKAAKEA

SEQ ID NO: 135 - protein, 473 aa, Unknown
  Description of Unknown: BaiG Pasolli 15265 LiuW 2016 SRR3992994 bin.12.fa OBMFBIGE 00758 sequence
MENNKNYMKGFVPYAIAAAILSLCGGFTASVPTAISTAWDADSSLTFITLAYSLAAAAMAPILGKLGGVIGRRKMLLSAMGLYTVGQALIAICPQNIPLLLVFRFMVGIGAAGIAPVVMSYIMMEFPPEKMGQGFTVYMAVACGMVIFGPTVGGIIMKVIGTANAWRIVMWVCVALCVITFLICFAKVKDNPNIPKGTMQGFDWAGAVFVLLMFGALVCVPTFGQQNGWASAATLASIGVAVVGLIVLFLVEKKASNPILNGKFMARKNFVLPVLVMLLTQGLMTACLTEIIRFGYAIDKATVAAVAMSIEYLGMAIGTVVLGPMADKKEPKVVAAIALVFVAIGSLIMLFIGENAGILMMGGALFFVGLGIGGNGTIFMKVALSGVAPAESSSASGTYNVFRDMTAPFGVAIFVPMFVTGMTKKAATGMAVPAAAASALHSVALVQLICVIVGIVVCFLIPSVHKKAEAAKE

SEQ ID NO: 136 - protein, 473 aa, Clostridium hiranonis
MTATNANYKKGFIPFAIAALLVGLIGGFTAVLAPAFVADMGLNDNNTTWIALALAMSTAACAPILGKLGDVLGRRKTLLLGIIVFTIGNVLTAIASSLIFMLGARFIVGVGTAAIAPVIMAYIVTEYPPEETGKGFALYMLISSAAVVVGPTCGGLIMQAFGWRMMMWVCVALCVITFFICSVMIKKTDFEKKSLDNFDKKGAVCVLIFFSLVLCIPSFGQNIGWTSAPFLGVTAVALVTLFLLIKAESSAENPILSGKFMKRKEFILPVLILFLTQGLMQANMTNVILFVRATQPENTIISSFAISILYIGMSLGSVFIGPMADKKEPKTVLTGSLLFTGIGCAMMYFFTETAPFAILAGSLGMLGIGLGGNATILMKVSLSGLSQAEAGSGTGTYGLFRDISAPFGVAVFVPLFANTVTTRMAGVMANGTAEAAAKSLASVSSIHTLALVEVCCVILAIVAVRMLPKIHNK

SEQ ID NO: 137 - protein, 473 aa, Unknown
  Description of Unknown: BaiG Pasolli 15265 ERR1620327 bin.47 BPCKCDAK 00026 sequence
MENNKNYMKGFVPYAVAAAILSLCGGFTASVPTAISTAWNADASLTFITLAYSLAAAAMAPIMGKLGGAIGRRKMLLGAMALYTVGQALIAICPQNVPLLLVFRFMVGIGAAGIAPVVMSYIMMEFPPEKMGQGFTIYMALACGMVIFGPTLGGIVMKVIGTASAWRIVMWICVALCVISFLICFAKVKDNPNIPKGSMKGFDWAGAVFVLLMFGALVCVPTFGQQNGWASVATLASIGVAVVGLIVLFLVEKKAASPILNGKFIARKNFVLPVLIMFLTQGLMTACLTEVIRFGYAIDKATVAAVAMSIEYLGMAIGTIVLGPMADKKEPKIVAAIALVFVAIGSLIMLFIGENAGILMMGGALFFVGLGLGGNTTIFMKVALSGVAPAESSSASGTFNVFKDMCAPFGVAIFVPMFVTGMTKKAATGMAVPAAAASALHSVALVQLICVVVGIVVCFLIPSVHKKAEAAKE

SEQ ID NO: 138 - protein, 473 aa, Unknown
  Description of Unknown: BaiG Pasolli 15265 ERR1018244 bin.34 GIGKKEJC 00811 sequence
MENNKNYMKGFVPYAVAAAILSLCGGFTASVPTAISTAWNADASLTFITLAYSLAAAAMAPIMGKLGGAIGRRKMLLGAMALYTVGQALIAICPQNVPLLLVFRFMVGIGAAGIAPVVMSYIMMEFPPEKMGQGFTIYMALACGMVIFGPTLGGIVMKVIGTASAWRIVMWICVALCVISFLICFAKVKDNPNIPKGSMKGFDWAGAVFVLLMFGALVCVPTFGQQNGWASVATLASIGVAVVGLIILFLVEKKAASPILNGKFIARKNFVLPVLIMFLTQGLMTACLTEVIRFGYAIDKATVAAVAMSIEYLGMAIGTIVLGPMADKKEPKIVAAIALVFVAIGSLIMLFIGENAGILMMGGALFFVGLGLGGNTTIFMKVALSGVAPAESSSASGTFNVFKDMCAPFGVAIFVPMFVTGMTKKAATGMAVPAAAASALHSVALVQLICVVVGIVVCFLIPSVHKKAEAAKE

SEQ ID NO: 139 - protein, 473 aa, Unknown
  Description of Unknown: BaiG Pasolli 15265 ERR1578621 bin.18 HPOHBHHF 00902 sequence
MENNKNYMKGFVPYAVAAAILSLCGGFTASVPTAISTAWNADASLTFITLAYSLAAAAMAPIMGKLGGAIGRRKMLLGAMALYTVGQALIAICPQNVPLLLVFRFMVGIGAAGIAPVVMSYIMMEFPPEKMGQGFTIYMALACGMVIFGPTLGGIVMKVIGTASAWRIVMWICVALCVISFLICFAKVKDNPNIPKGSMKGFDWAGAVFVLLMFGALVCVPTFGQQNGWASVATLASIGVAVVGLIILFLVEKKAASPILNGKFIARKNFVLPVLIMFLTQGLMTACLTEVIRFGYAIDKATVAAVAMSIEYLGMAIGTIVLGPMADKKEPKIVAAIALVFVAIGSLIMLFIGENAGILMMGGALFFVGLGLGGNTTIFMKVALSGVAPAESSSASGTFNVFKDMCAPFGVAIFVPMFVTGMTKKAATGMAVPAAAASALHSVALVQLICVVVGIVVCFLIPSVHKKAEAVKE

SEQ ID NO: 140 - protein, 471 aa, Unknown; identical to SEQ ID NO: 134
  Description of Unknown: BaiG Pasolli 15005 ERR414305 bin.35 IEHPGPHH 00306 sequence

SEQ ID NO: 141 - protein, 473 aa, Unknown
  Description of Unknown: BaiG Pasolli 15202 ERR1913015 bin.15 PGCAENMN 00639 sequence
MDATVNKNYKKGFVPFAMAAALVSLAGGFTATIPNNIVSSWGLDDSWLTWITLAMSMGMAACAPVLGKLGDIFGRRGAALFGMAVMVVGELGLGLAPNGAVWMAILFRFVIGVGAAAISPTVIAYITSEFPPAKMGTGFAVYMALSSGMVIFGPTIGGIIVQTTQNYRIILYICAVLAAACFVVGLFTMPKETGPKKGFAGFDIFGGIFIILFFSLALCVPNLAQGEAGWFGKSTLIVIAATIVCLVVLVFAEKKAKNPILNGKFMARKQFILPVVVLFLTQGLMQACMTNTIRFTMILDPTSTVGNYATSILYVGMTIGNIAVAPLASKKEPRYISALALVFCLIGAAIQLLYTAESGFIVFAASLFFVGLGLGGNGTIFMNVALSGLDPKIAGAGSGTYTVFRDLSAPFGVAVFCPMFVAGYSAAMATGDSVRIAADLVSSMHNVAWVQMGCVVAGMIVCLMIPKIHNKNA

SEQ ID NO: 142 - protein, 663 aa, Unknown
  Description of Unknown: BaiH Pasolli 15265 XieH 2016 YSZC12003 37135 bin.19.fa ALFGHMFB 00317 sequence
MITDMKNAKIFSPLQLGRTTLKNRIAMAPMSMHYEATNGTVPKQLADIFVRRAEGGAGYVVIDAVTVDHKYWYIGKTTALDKDSLVPQFAAFAKRVSDAGSTLIPQIIHPGPESICALKGITPLGPSVNTNANGAVSRPITIDEIHKVVKQYGQAARRAEEAGCGGIALHCAHAYMLPGAFLSPLRNKRMDEYGGCIDNRARLILEIIEECRRNISRDFPIVLRVSGSEREPGGNSLDEMLYLAPKFEAAGVDMLEVSGGVQYEGLQNILPSHSQKIGMNVYEASEIKKVVNIPVFVVGKINDVRYAADLVERGLVDGVSMGRPLLADPDLPKKALENRFDDITPCGSCGGRCITPEDPHHPVCKCHINPLVGHEYDFPFNPTDKPKKVLIIGAGPGGMYTAVTAAERGHDVTVWEKGKQIGGQLNLAVVSPGKQEMCKWLTHLNYRAKKAGVKFEFKKEATVENVKEFAPDAVVVATGATPLIPTFIKGVGDYPVITTHDVLSRKVTIPKGTVCILGGGEVACETAEMIMADARPNSFATTGSIGDVEVTLVEMQPQLMTGVCLPNRNIALASLRREGVKSYINSKVLEVTEHDVKIQHKDGSEEWLKGFDYIILGLGSRKYDPLSEELKAFVPEVHVIGDAVKPGQSSDAMHQGFHIGYEL

SEQ ID NO: 143 - protein, 663 aa, Unknown
  Description of Unknown: BaiH Pasolli 15265 CosteaPI 2017 SID713A074-11-90-0 bin.3.fa BFBJEEJO 00001 sequence
MITDMKDAKIFSPLQLGRTTLKNRIAMAPMSMHYEATNGTVPKQLADIFVRRAEGGAGYVVIDAVTVDHKYWYIGKTTALDKDSLVPQFAAFAKRVSDAGSTLFPQLIHPGPESICALKGITPLGPSVNTNANGAVSRPITIDEIHKVVKQYGQAARRAEEAGCGGIALHVAHAYMLPGAFLSPLRNKRMDEYGGCIDNRARLILEIIEECRRNISRDFPIVLRVSGSEREPGGNSLDEMLYLAPKFEAAGVDMLEVSGGVQYEGLQNILPSHSQKIGMNVYEASEIKKVVNIPVFVVGKINDVRYAADLVERGLVDGVSMGRPLLADPDLPKKAYENRFDDITPCGSCGGRCITPEDPHHPVCKCHINPLVGHEYDYPFNPTDKPKKVLVIGAGPGGMYTAVTAAERGHDVTVWEKSKQIGGQLNLAVVSPGKQEMCKWLTHLNYRAKKAGVKFEFKKEATVENVKEFAPDAVVVATGATPLIPTFIKGVGDYPIITTHDILSRKVTIPKGTVCILGGGEVACETAEMLMADARPNSFATTGSIGDVEVTLVEMQPQLMTGVCLPNRNIALASLRREGVKSYINSKVLEVTEHEVKIQHKDGTEEWLKGFDYIVLGLGSRKYDPLSEELKAFVPEVHVIGDAIKPGQSSDAMHQGFHVGYEL

SEQ ID NO: 144 - protein, 661 aa, Unknown
  Description of Unknown: BaiH Pasolli 15210 FengQ 2015 SID531416 bin.49.fa CEDOFBAM 00070 sequence
MDMKNAKLFQPLKVGSLTLHNRVGMAPMSMDYEAKDGTVPKRLADIFVRRAEGGTGYVMIDAVTVDRKYQYIGKTTCLDSDDLVPQFRDFAKRVSDTGSTLVPQIIHPGPESICGFRGIPPLGPSVNTNANCHVSRAMTIDEIHAVIKQFGQAARRVEEAGCGAIGLHCAHAYMMPGAFLSPLRNKRMDEYGGCIDNRARFILEVIAEVRANVSPDFPIFLRISGDERIEGGNSLEEMLYLAPKFEAAGVNLLEVSGGVQYEGLENILPSHGKRIGMNVYEASEIKKVVNIPVFVVGKINDIRYAADIVERGLVDGVSMGRPLLADPDLCNKAYENRFDDITPCGSCGGSCITRTAEHPQCRCHINPRVGHEYDYPEKPAEKVKKTLIIGAGPGGMYAAVTAAERGHDVTVWEADDKIGGQLNLAVTSPGKQEMTKWLVHLNYRAKKAGVKFEFGKEATVEAVKEFNPDAVIVATGAKPLIPPIKGTQDYPVRTAHDFLKGKFVIPKGRVCILGGGEVACETAETIIANARPTAFTRGFDASIGDIDVTIIEMLPQILTGVCMPNRAPLMRTLRSNGVHVNVNTKVLEVTDHDVKVQRKDGTEEWLRGFDYIIFGLGARNYDPLSEQLREFVPEVHVIGDAVKARQSSDAMWEGFEVAYNL

SEQ ID NO: 145 - protein, 661 aa, Unknown
  Description of Unknown: BaiH Pasolli 15209 RaymondF 2016 P21E7 bin.22.fa DDJCLBHB 00376 sequence
MDMKNAKLFQPLQVGSLTLRNRVGMAPMSMDYEAKDGTVPKRLADIFVRRAEGGTGYVMIDAVTVDRKYQYIGKTTCLDSDDLVPQFRDFAKRVTDTGSTLVPQIIHPGPESICGFRGIPPLGPSVNTNANCHVSRAMSIDEIHEVIKQFGQAARRVEEAGCGAIGLHCAHAYMMPGAFLSPLRNKRMDEYGGCIDNRARFILEVIAEVRANVSPDFPIFLRISGDERIEGGNSLEEMLYLAPKFEAAGVNLLEVSGGVQYEGLENILPSHGKRIGMNVYEASEIKKVVNIPVFVVGKINDIRYAADIVERGLVDGVSMGRPLLADPDLCNKAYENRFDDITPCGSCGGSCITRTAEHPQCRCHINPRVGHEYDYPEKPAEKVKKTLIIGAGPGGMYAAVTAAERGHDVTVWEADDKIGGQLNLAVTSPGKQEMTKWLVHLNYRAKKAGVKFEFGKEATVEAVKEFNPDAVIVATGAKPLIPPIKGTQDYPVRTAHDFLKGKFVIPKGRVCILGGGEVACETAETIIANARPTAFTRGFDASIGDIDVTIIEMLPQILTGVCMPNRAPLMRTLRSNGVHVNVNTKVLEVTDHDVKVQRKDGTEEWLRGFDYIIFGLGARNYDPLSEQLREFVPEVHVIGDAVKARQSSDAMWEGFEVAYNL

SEQ ID NO: 146 - protein, 663 aa, Unknown
  Description of Unknown: BaiH Pasolli 15265 SchirmerM 2016 G89065 bin.22.fa EBDJMKCO 00062 sequence
MITDMKDAKIFSPLQLGRTTLKNRIAMAPMSMHYEATNGTVPKQLADIFVRRAEGGAGYVVIDAVTVDHKYWYIGKTTALDKDSLVPQFAAFAKRVSDAGSTLFPQLIHPGPESICALKGITPLGPSVNTNANGAVSRPITIDEIHKVVKQYGQAARRAEEAGCGGIALHVAHAYMLPGAFLSPLRNKRMDEYGGCIDNRARLILEIIEECRRNISRDFPIVLRVSGSEREPGGNSLDEMLYLAPKFEAAGVDMLEVSGGVQYEGLQNILPSHSQKIGMNVYEASEIKKVVNIPVFVVGKINDVRYAADLVERGLVDGVSMGRPLLADPDLPKKAYENRFDDITPCGSCGGRCITPEDPHHPVCKCHINPLVGHEYDYPFNPTDKPKKVLIIGAGPGGMYTAVTAAERGHDVTVWEKSKQIGGQLNLAVVSPGKQEMCKWLTHLNYRAKKAGVKFEFKKEATVENVKEFAPDAVVVATGATPLIPTFIKGVGDYPVITTHDILSRKVTIPKGTVCILGGGEVACETAEMLMADARPNSFATTGSIGDVEVTLVEMQPQLMTGVCLPNRNIALASLRREGVKSYINSKVLEVTEHEVKIQHKDGTEEWLKGFDYIVLGLGSRKYDPLSEELKAFVPEVHVIGDAIKPGQSSDAMHQGFHVGYEL

SEQ ID NO: 147 - protein, 661 aa, Unknown
  Description of Unknown: BaiH Pasolli 15211 LouisS 2016 AS60 3 bin.9.fa GHGEBOMP 00328 sequence
MDMKNSKLFSPLTVGSLTLRNRVGMAPMSMDYEAKDGTVPKRLADIFVRRAEGGTGYVMIDAVTVDRKYQYIGKTTCLDSDDLVPQFRDFAKRVSDTGSTLVPQIIHPGPESICGFRGIPPLGPSVNTNANCHVSRAMTIDEIHEVIKQFGQAARRVEEAGCGAIGLHCAHAYMMPGAFLSPLRNKRMDEYGGCIDNRARFILEVIAEVRANVSPDFPIFLRVSGSERVEGGNSLDEMLYLAPKFEAAGVNLIEVSGGTQYEGLENIIPSHGKHIGMNVYEASEIKKVVNIPVFVVGKINDIRYAADIVERGLVDGVSMGRPLLADPDLCNKAYENRFDDITPCGSCGGSCITRTAERPQCRCHINPRVGYEYDYPDKPAEEVKKTLIIGAGPGGMYAAVTAAERGHDVTVWEADDKIGGQLNLAVTSPGKQEMTKWLVHLNYRAKKAGVKFEFGKEATVEAVKEFNPDAVIVATGAKPLIPPIKGTQDYPVRTAHDFLKGKFVIPKGRVCILGGGEVACETAETILANARPTAFTRGFDASIGDVEVTIIEMLPQILTGVCMPNRAPLMRTLKANGVDINVNTKVLEVTDHDVKVQRKDGTEEWLRGFDYIIFGLGARNYDPLSEKLKEFVPEVHVIGDAVKARQSSDAMWEGFEVAYNL

SEQ ID NO: 148 - protein, 661 aa, Unknown
  Description of Unknown: BaiH Pasolli 15202 Bengtsson-PalmeJ 2015 TRAVELRES21 bin.108.fa KLDDHOPD 00153 sequence
MDMHNAKLFSPLKVGSLTLRNRVGMAPMSMDYEAKDGTVPKQLADIFVRRAEGGTGFVVIDAVTVDRKYQYIGKTTCLDSDDLVPQFRDFAQRVAATGSTLIPQIIHPGPESICGFRGIPPLGPSVNTNANCHVSRAMTIDEIHEVIKQYGQAARRVEEAGCGGIGLHCAHAYMMPGAFLSPLRNKRMDEYGGCIDNRARFILEVIAEVRRNVSPDFPIFLRISGDERQEGGNSLEEMLYLAPKFEAAGVNLLEVSGGVQYEGLENILPSHGKRIGMNVYEASEIKKVVNIPVYVVGKINDIRYAADIVERGLVDGVSMGRPLLADPDLCNKAIENRFDDITPCGSCGGSCITRTAEHPQCRCHINPRVGHEYDYPDKPAERVKKTLIIGAGPGGMYAAVTAAERGHDVTVWEADDKIGGQLNLAVTSPGKQEMTKWLVHLNYRAKKAGVKFEFGKEATVEAVREFAPDAVIVATGAKPLIPPIKGTQEYPVRTAHDFLRGKFVIPKGRVCILGGGEVACETAETIINNARPTAFTRGFDASIGDIDVTIIEMLPQILTGVCMPNRAPLMRTLKKNDVHINVNTKVLEVTDHDVKVQRKDGTEEWLRGFDYVIFGLGARNYDPLSEKLREFVPEVHVIGDAVKARQSSDAMWEGFEVAYNL

SEQ ID NO: 149 - protein, 663 aa, Unknown
  Description of Unknown: BaiH Pasolli 15265 Obregon-TitoAJ 2015 SM11 bin.2.fa LFPPKIPJ 00391 sequence
MITDMKDAKIFSPLQLGRTTLKNRIAMAPMSMHYEATDGTVPKQLADIFVRRAEGGAGYVVIDAVTVDHKYWYIGKTTALDKDSLVPQFAAFAKRVSDAGSTLFPQLIHPGPESICALKGIKPLGPSVNTNANGAVSRAITIDEIHKVVKQYGQAARRAEEAGCGGIALHVAHAYMLPGAFLSPLRNKRMDEYGGCIDNRARLILEIIEECRRNISRDFPIVLRVSGSERVPGGNSLDEMLYLAPKFEAAGVDMLEVSGGVQYEDLQDILPSHSQKIGKNVYEASEIKKVVNIPVFAVGKINDIRYAADLVERGLIDGVSMGRPLLADPDLPKKAYENRFDDITPCGSCGGRCITPEDPHHPVCKCHINPLVGHEYDFPFNPTTSPKKVLIIGAGPGGMYTAVTAAERGHDVTVWEKSKQIGGQLNLAVVSPGKQEMCKWLTHLNYRAKKAGVKFEFKKEATVEAVREFAPDAVVVATGATPLIPTFIKGVGDYPVITTHDILSRKITIPKGTVCILGGGEVACETAEMLMADARPNSFATTGSIGDVEVTLVEMQPQLMTGVCLPNRNIALASLRREGVKSYINSKVLEVTEHDVKIQHKDGSEEWLKGFDYIVLGLGSRKYDPLSEELKTFVPEVHVIGDAIKPGQSSDAMHQGFHVGYEL

SEQ ID NO: 150 - protein, 664 aa, Unknown
  Description of Unknown: BaiH Pasolli 15002 LiJ 2014 V1.FI04 bin.94.fa MJMNNJHI 01042 sequence
MVTDMKDAKLFSPLQLGRTTLKNRIAMAPMSMHYEATDGTVPKQLADIFVRRAEGGVGYVVIDAVTVDHKYWYIGKTTALDKDKLVPQFAAFAKRITDAGSTLFPQIVHPGPESICALKGIKPMGPSVNTNANGHVSREMTIEEIQKVVKQYGQAARRAEEAGCGGIALHAAHAYMLPGAFLSPLRNKRMDEYGGCIDNRARLILEIIEECRRNVSRDFPIVLRISGDERQAGGNSLEEMLYLAPKFEAAGVDMLEVSGGVQYEGLQNILPSHSKKIGVNVYEASEIKKVVNIPVFVVGKINDIRYAADLVERGVVDGVTLGRPLLADPDLPKKALENRFDDITPCGSCGGRCITPENPQHPVCKCHINPLVGREYDFPFNPTDKPKKLLVIGAGPGGMYTAVTAAERGHDVTVWEKSKHIGGQLNLAVVSPGKQEMTKWMVHLNYRAKKAGVKFEFKKEATVELVKEFAPDAVVVATGATPLIPGFIKGVGDYPIITTHDILSRKVTIPQGRVCILGGGEVACETAETLMADARPHSIYSTGGSIGDVEVTLVEMMPQMMTGVCQPNRSVAMASLRREGVQMHVNSKVLEVTEHDVKIQHKDGSEEWLKGFDYIVLGLGSRKYDPLSEDLKAFVPEVYVIGDAVKPGQSSDAMHQGFEVAYNL

SEQ ID NO: 151 - protein, 663 aa, Unknown
  Description of Unknown: BaiH Pasolli 15004 FengQ 2015 SID31866 bin.65.fa NCFGPKLH 00816 sequence
MITDMKNAKLFSPLQIGRTTLKNRIAMAPMSMHYEATDGTVPKQLADIFVRRAEGGVGYVVIDAVTVDHKYWYIGKTTALDKDKLVPQFKAFAQRVTDAGSTLIPQIIHPGPESICALKGIKPLGPSVNTNANGAVSRPMTIEEIQKVVKQYGQAARRAEEAGCGGIALHCAHAYMLPGAFLSPLRNKRMDEYGGCIDNRARLILEIIEECRRNVSRDFPIVLRVSGSERLPGGNSLEEMLYLAPKFEAAGVDMLEVSGGVQYEGLQNILPSHSQKIGMNVYEASEIKKVVNIPVFVVGKINDIRYGADIVERGLVDGITLGRPLLADPDLPKKALENRFDDITPCGSCGGRCITPENPQHPVCKCHINPLVGQEYDFPFNPTTSPKKVLVIGAGPGGMYTAVTAAERGHDVTVWEKKAIIGGQLNLAVVSPGKQEMCKWLTHLNYRAKKAGVKFEFKKEATVESVKEFAPDTVVVATGATPLIPTFIKGVGEYPVITTHDILSRKITIPKGRVCILGGGEVACETAEMLMADARPNSFATTGSIGDVEVTLIEMLPQMMTGVCLPNRNIALANLRREGVQMNVNSKVLEVTEHDVKIQRKDGTEEWLRGFDYIVLGLGSRKYDPISEDLKAFVPEVYVIGDAVKPGQSSDAMHQGFYTGYKI

SEQ ID NO: 152 - protein, 681 aa, Unknown
  Description of Unknown: BaiH Pasolli 15005 LiJ 2014 MH0358 bin.56.fa NPCPOAJM 00311 sequence
MITDMKNAKLFSPLKLGRTTLKNRIAMAPMSMHYEATDGTVPKQLADIFVRRAEGGVGYVVIDAVTVDHKYWYIGKTTALDKDKLVPQFADFAKRVSDAGSTLIPQIIHPGPESICALKGIKPLGPSVNVNANGHVCREITIDEIHKVVKQYGQAARRAEEAGCGGIALHCAHAYMLPGAFLSPLRNKRMDEYGGCIDNRARLMLEIIEEVRRNVSRDFPIVLRVSGDERVTGGNTLDEMLYLAPKFEAAGVDMLEVSGGVQYEGLQYIIPSHSMKIGKNVYEASEIKKVVNIPVFVVGKINDIRYAADIVERGLVDGVTLGRPLLADPDLPKKALENRFDDITPCGSCAGRCITPEDPMHPICKCHINPLVGREYDFPFNPTDKPKNVLIIGAGPGGMYTAVTAAERGHNVTVWEKSNRIGGQLNLAVVSPGKQEMTKWLVHLNYRAKKAGVKFEFKKEATVEAVKEFAPDAVVVATGATPFIPPFIKGINECETVTTHDVLSRKVTIPNGRVCILGGGEVACETAEMLYRDARPHSIYSPKFRNGDVDVTLIEMMPQMMTGVCQPNRSVAMEALHHHGANMFVNSKVLEINEYTIQMPVGREMKDVVKHDVKIQHLEDGSEEWLKNFDYIVLGLGSRKYDPLSEELKTFVPEVHVIGDAIKPGQSSDAMHQGFEVGYNL

SEQ ID NO: 153 - protein, 663 aa, Unknown; identical to SEQ ID NO: 143
  Description of Unknown: BaiH Pasolli 15265 LiuW 2016 SRR3992994 bin.12.fa OBMFBIGE 01714 sequence

SEQ ID NO: 154 - protein, 663 aa, Unknown
  Description of Unknown: BaiH Pasolli 4621 Obregon-TitoAJ 2015 NO11 bin.28.fa ODBMCAMJ 01962 sequence
MITDMKNSKLFSPIQIGRTTLKNRVAMAPMSMDYEAADGSVPKKLADIFVRRAEGGTGYIVIDAVTVDSKYPYMGNTTSLDKDSLVPQFKQFAERVREAGSVLIPQIIHAGPESICGYRKIAPLGPSANVNANCHVSRPVTVKEIQKIVKQYGQAARRAEEAGCGGVSLHCAHAYMLPGSFLSPLRNKRMDEYGGGLDNRARFILEVIEEVRKNVSRDFPIFLRISGDERMIGGNSLEDMLYLAPKFEAAGVDMLEVSGGTQYEGLEHIIPCQNKSIGVNVYEASEIKKVVNIPVFVVGKINDIRYAADIVERGLVDGVSMGRPLLADPDLCKKAYENRFDDITPCASCGGSCITRSEASPQCRCHINPRVGREYDFPEVPAEKSKKVLVVGAGPGGMMAAVTAAERGHQVTVWEADKKIGGQLNLAVVAPGKQEMTKWMVHLNYRAKKAGVTFEFGKTGTVEAVREFAPDAVIVATGARPLIPPIKGTQDYPVRTAHDFLRGKIVIPRGRVCVLGGGAVACETAEVLLENARPNSFTRGFEASIGDVEVTMVEMLPQLLTNVCAPNRTPMVRKLKSKGVDINVNSKILEVTDHDVKVQRADGTEEWLRGFDYVLFGLGSRNYDPLSEELKTFIPEVYAIGDAVRARQASFAMWEGFEAAYKL

SEQ ID NO: 155 - protein, 664 aa, Unknown
  Description of Unknown: BaiH Pasolli 15003 XieH 2016 YSZC12003 35390 bin.5.fa PIKIEFGP 00578 sequence
MITDMKNAKLFSPLQLGKTTLKNRIAMAPMSMHYEATDGTVPKQLADIFVRRAEGGVGYVVIDAVTVDHKYWYIGKTTALDKDKLVPQFAAFAKRITDAGSTLFPQIVHPGPESICALKGIKPMGPSVNTNANGHVSREMTIEEIQKVIKQYGQAARRAEEAGCGGIALHAAHAYMLPGAFLSPLRNKRMDEYGGCIDNRARLILEIIEECRRNVSRDFPIVLRISGDERQAGGNSLEEMLYLAPKFEAAGVDMLEVSGGVQYEGLQNILPSHSMKIGMNVYEASEIKKVVNIPVFVVGKINDIRYAADLVERGLVDGVTLGRPLLADPDLPKKALENRFDDITPCGSCGGRCITPENPQHPVCKCHINPLVGREYDFPFNPTDKPKKLLVIGAGPGGMYTAVTAAERGHDVTVWEKSNHIGGQLNLAVVSPGKQEMTKWMVHLNYRAKKAGVKFEFKKEATVELVKEFAPDAVVVATGATPLIPTFIKGVGDYPIITTHDILSRRITIPQGRVCILGGGEVACETAEMIMKDARPNSVYSTGGSIGDVEVSLVEMMPQMMTGVCQPNRSVAMASLRHEGVQMHVNSKVLEVTEHDVKIQHKDGSEEWLKGFDYIVLGLGSRKYDPLSEELKAFVPEVYVIGDAVKPGQSSDAMHQGFEVAYNL

SEQ ID NO: 156 - protein, 661 aa, Clostridium hiranonis
MDMKNSKLFSPLTIGSLTLNNRVGMAPMSMDYEAADGTVPKRLADIFVRRAEGGTGYVTIDAVTIDSKYKYMGNTTALDSDDLVPQFREFATRVREAGSTLIPQVIHPGPESICGYRHIAPLGPSVNTNANCHVSRAISVDEIHEIIKQFGQAARRVEEAGCGGIGLHCAHAYMLPGSFLSPLRNKRMDEYGGCLDNRARFVIEMIEEVRRNVSPDFPIMLRISGDERMIGGNSLEDMLYLAPKFVEAGVNMFEVSGGTQYEGLEHIIPSQNKSIGVNVHEASEIKKVVDVPVYAVGKINDIRYAAEIVERGLVDGVSIGRPLLADPDLCNKAKENLFDEITPCASCGGSCISRTADRPQCRCHINPRVGFEYDYPEVPAEKSKKVLVVGAGPGGMMAAVTAAERGHDVTLWEADTQIGGQINLAVVAPGKQEMTKWLSHLNYRAKKAGVKMVFGQEATVENIKEFAPEAVIVATGARPLVPPIKGTKDYPVLTAHDFLRGKFVIPKGKVCVLGGGAVACETAETVLENARPNAFTRGFDASIGDVDVTLVEMLPQLLTGVCAPNRTPLIRKLKNKGVHINVNTKILEVTDHDVKVQRADGTEEWLKGFDYILFGLGSRNYDPISEQIKEFVPEVHVVGDAKRARQASFAMWEAFEAAYSL

SEQ ID NO: 157 - protein, 663 aa, Unknown
  Description of Unknown: BaiH Pasolli 15265 ERR1620327 bin.47 BPCKCDAK 00031 sequence
MITDMKNAKIFSPLQLGRTTLKNRIAMAPMSMHYEATNGTVPKQLADIFVRRAEGGAGYVVIDAVTVDHKYWYIGKTTALDKDSLVPQFAAFAKRVSDAGSTLIPQIIHPGPESICALKGITPLGPSVNTNANGAVSRPITIDEIHKVVKQYGQAARRAEEAGCGGIALHCAHAYMLPGAFLSPLRNKRMDEYGGCIDNRARLILEIIEECRRNISRDFPIVLRVSGSEREPGGNSLDEMLYLAPKFEAAGVDMLEVSGGVQYEGLQNILPSHSQKIGMNVYEASEIKKVVNIPVFVVGKINDVRYAADLVERGLVDGVSMGRPLLADPDLPKKALENRFDDITPCGSCGGRCITPEDPHHPVCKCHINPLVGHEYDFPFNPTDKPKKVLIIGAGPGGMYTAVTAAERGHDVTVWEKSKQIGGQLNLAVVSPGKQEMCKWLTHLNYRAKKAGVKFEFKKEATVENVKEFAPDAVVVATGATPLIPTFIKGVGDYPVITTHDVLSRKVTIPKGTVCILGGGEVACETAEMIMADARPNSFATTGSIGDVEVTLVEMQPQLMTGVCLPNRNIALASLRREGVKSYINSKVLEVTEHDVKIQHKDGSEEWLKGFDYIILGLGSRKYDPLSEELKAFVPEVHVIGDAVKPGQSSDAMHQGFHIGYEL

SEQ ID NO: 158 - protein, 664 aa, Eubacterium sp.
MITDMKDAKIFQPLQLGRTTLKNRIAMAPMSMHYEATNGTVPKQLADIFVRRAEGGAGYVTIDAVTVDHKYWYIGKTTSLDKDSLVPQFSRFAKRVSDAGSYLFPQIIHPGPESICAMKGITPIGPSVNTNANGDVSRPATIKEIHKIIKQYGKAARRAEEAGCGGIALHAAHAYMLPGAFLSPLRNKRMDEYGGTIDNRARLILEIIEECRKNVSEDFPIVLRISGSERIEGGNSLEEMLYLAPKFEAAGVNMLEVSGGVQYEDMQDIIPSHSKKIGRNVYEASEIKKVVNIPVFVVGKINDIRYAADIVERGLVDGVSLGRPLLADPDLPNKARENRFDDITPCASCGGRCVTPKDPQHPVCQCHINPLVGHEYDYPFNPVDTPKNVLVIGAGPGGMYAAVIAAERGHHVTVWEKNCQVGGQLALAVVTPGKQEMCKWLSHLTYRANKAGVTFEFNKEATVDDVKEFAPDAVIVATGARPFVPPFIKGLTDYPVTTTHDILSRKVTVPKGTVCILGGGEVACETAEMLMTDARPASFVKTGSIGDVEVTMVEMMPQLMTNVCLPNRNVLMDSLHRSGVKTYVNAKVLEVTDHDVKIQHTTDGSEEWLKGFDHIVVGMGSRNYDPLSEELKKFVPEVRVVGDAVRTGLASKALHEGYFAGYEI

SEQ ID NO: 159 - protein, 663 aa, Unknown
  Description of Unknown: BaiH Pasolli 15265 ERR1018244 bin.34 GIGKKEJC 00806 sequence
MITDMKNAKIFSPLQLGRTTLKNRIAMAPMSMHYEATNGTVPKQLADIFVRRAEGGAGYVVIDAVTVDHKYWYIGKTTALDKDSLVPQFAAFAKRVSDAGSTLIPQIIHPGPESICALKGITPLGPSVNTNANGAVSRPITIDEIHKVVKQYGQAARRAEEAGCGGIALHCAHAYMLPGAFLSPLRNKRMDEYGGCIDNRARLILEIIEECRRNISRDFPIVLRVSGSEREPGGNSLDEMLYLAPKFEAAGVDMLEVSGGVQYEGLQNILPSHSQKIGMNVYEASEIKKVVNIPVFVVGKINDVRYAADLVERGLVDGVSMGRPLLADPDLPKKALENRFDDITPCGSCGGRCITPEDPHHPVCKCHINPLVGHEYDFPFNPTDKPRKVLIIGAGPGGMYTAVTAAERGHDVTVWEKGKQIGGQLNLAVVSPGKQEMCKWLTHLNYRAKKAGVKFEFKKEATVENVKEFAPDAVVVATGATPLIPTFIKGVGDYPVITTHDVLSRKVTIPKGTVCILGGGEVACETAEMIMADARPNSFATTGSIGDVEVTLVEMQPQLMTGVCLPNRNIALASLRREGVKSYINSKVLEVTEHDVKIQHKDGTEEWLKGFDYIILGLGSRKYDPLSEELKAFVPEVHVIGDAVKPGQSSDAMHQGFHIGYEL

SEQ ID NO: 160 - protein, 663 aa, Unknown
  Description of Unknown: BaiH Pasolli 15265 ERR1578621 bin.18 HPOHBHHF 00907 sequence
MITDMKNAKIFSPLQLGRTTLKNRIAMAPMSMHYEATNGTVPKQLADIFVRRAEGGAGYVVIDAVTVDHKYWYIGKTTALDKDSLVPQFAAFAKRVSDAGSTLIPQIIHPGPESICALKGITPLGPSVNTNANGAVSRPITIDEIHKVVKQYGQAARRAEEAGCGGIALHCAHAYMLPGAFLSPLRNKRMDEYGGCIDNRARLILEIIEECRRNISRDFPIVLRVSGSEREPGGNSLDEMLYLAPKFEAAGVDMLEVSGGVQYEGLQNILPSHSQKIGMNVYEASEIKKVVNIPVFVVGKINDVRYAADLVERGLVDGVSMGRPLLADPDLPKKALENRFDDITPCGSCGGRCITPEDPHHPVCKCHINPLVGHEYDFPFNPTDKPKKVLIIGAGPGGMYTAVTAAERGHDVTVWEKSKQIGGQLNLAVVSPGKQEMCKWLTHLNYRAKKAGVKFEFKKEATVENVKEFAPDAVVVATGATPLIPTFIKGVGDYPVITTHDVLSRKVTIPKGTVCILGGGEVACETAEMIMADARPNSFATTGSIGDVEVTLVEMQPQLMTGVCLPNRNIALASLRREGVKSYINSKVLEVTEHDVKIQHKDGSEEWLKGFDYIVLGLGSRKYDPLSEELKAFVPEVHVIGDAVKPGQSSDAMHQGFHIGYEL

SEQ ID NO: 161 - protein, 681 aa, Unknown; identical to SEQ ID NO: 152
  Description of Unknown: BaiH Pasolli 15005 ERR414305 bin.35 IEHPGPHH 00301 sequence

SEQ ID NO: 162 - protein, 663 aa, Unknown; identical to SEQ ID NO: 154
  Description of Unknown: BaiH Pasolli 4621 SRR2726241 bin.48 LDBMBPGB 00665 sequence

SEQ ID NO: 163 - protein, 661 aa, Unknown; identical to SEQ ID NO: 148
  Description of Unknown: BaiH Pasolli 15202 ERR1913015 bin.15 PGCAENMN 00636 sequence

SEQ ID NO: 164 - protein, 184 aa, Unknown
  Description of Unknown: BaiI Pasolli 15265 XieH 2016 YSZC12003 37135 bin.19.fa ALFGHMFB 00312 sequence
MATRNIPFPDKVRDMVLDVITHVRRQEYTPEQLCQLQKIIECKYFYWWCMDMKKEEYMMELFTDDFRYYLNGHLTVKDKLLQARNAKWCNKDMQTMHMGHQPMIWLIDENHARGVFQYEDHMCYYDDCEVLQSWMVYCDDFVKGEDGAWRIQKLRMAYREMDGNFRTTMVPRDWAPDAWDTPDY

SEQ ID NO: 165 - protein, 184 aa, Unknown
  Description of Unknown: BaiI Pasolli 15265 CosteaPI 2017 SID713A074-11-90-0 bin.3.fa BFBJEEJO 00006 sequence
MATRNIPFPDKVRDMVLDVIKHVRRQEYTPEQLCQLQKIIECKYFYWWCMDMKKEEYVMELFTDDFRYYLNGHLAVKDKLLQARNAKWCNKDMQTMHMGHQPMIWLIDDTHARGVFQYEDHMCYYDNSEVLQGWLVYCDDFVKGDDGAWRIQKLRMAYREMDGSFRSTMVPKDWVPDEWDTPNY

SEQ ID NO: 166 - protein, 168 aa, Unknown
  Description of Unknown: BaiI Pasolli 15210 FengQ 2015 SID531416 bin.49.fa CEDOFBAM 00072 sequence
MTIPADKEITGLVREILTEAGKGYTPEQLAEIPNILATKYKYWWCIDMQMWDLLPDVYTEPFEAYSNGRLVPNKCIQDQVDRAAVVCDDSMVPTHMGHNPIVQFTGERSCRLLTRLNDYHTYKDDGSTYEGWALYVDDMVKCDDGVWRIKTLRLTYRKILGKLRTMGV

SEQ ID NO: 167 - protein, 167 aa, Unknown
  Description of Unknown: BaiI Pasolli 15210 FengQ 2015 SID531416 bin.49.fa CEDOFBAM 00262 sequence
MAIKVIPEDPKMRELIEEVMLKVREQKYTPEQLCEVRRVIDAQHFYWWCMDMKREEWAGSDLFTEDFSYYCFGPQKVTAKEQAERSKHVNANMATTHMGHQPLVWLMDENNARAIFMYEDHNMYKDDGTLVRGWAIYIDDFVRGEDDKWRMKTLRLNYLKMDGRYRM

SEQ ID NO: 168 - protein, 185 aa, Unknown
  Description of Unknown: BaiI Pasolli 15210 FengQ 2015 SID531416 bin.49.fa CEDOFBAM 01818 sequence
MINLTDLIPEERSMIVETMVGAYKQQYTPERLCDLQKIIDAQYFYWWMNDMKYEEWGETLFESEMECWFTGVGEYKSTPMGWARGAKYCNAFLNSAHMGHNPMVWFMDDTHARGIFLFESNMNYRDNGKLHEHVIIYVDDFVKRPDGQWGISAYRLMQTKLQGDLMPERVTPPEDYVMPESVPMP

SEQ ID NO: 169 - protein, 168 aa, Unknown; identical to SEQ ID NO: 166
  Description of Unknown: BaiI Pasolli 15209 RaymondF 2016 P21E7 bin.22.fa DDJCLBHB 00378 sequence

SEQ ID NO: 170 - protein, 182 aa, Unknown
  Description of Unknown: BaiI Pasolli 15209 RaymondF 2016 P21E7 bin.22.fa DDJCLBHB 00381 sequence
MAVFNIPFNEEFRGMVIDVMKHVRRQQYTPEMLCEHQKILECMYFYWWSMDMKKEEYATELFDDDFEYWNGRPGTTDKKKQAMVSKWCNRNMQTMHMGHQPMIWLQDENHARGIFQYEDHMCYFDDSSVCQGWAVYCEDFVKRDGVWRISRHRMAYKQMDGTYKDPFPPKDWVPEDWEEPNY

SEQ ID NO: 171 - protein, 184 aa, Unknown
  Description of Unknown: BaiI Pasolli 15265 SchirmerM 2016 G89065 bin.22.fa EBDJMKCO 00368 sequence
MATRNIPFSDKFRDMVLEVITHVRRQEYTPEQLCQLQKVIECKYFYWWCMDMKKEEYVMELFTDDFRYYLNGHLAVKDKLLQARNAKWCNKDMQTMHMGHQPMIWLIDDTHARGVFQYEDHMCYYDDCEVLQGWLVYCDDFVKGDDGAWRIQKLRMAYREMDGNFRSTMVPKDWTPDEWDTPNY

SEQ ID NO: 172 - protein, 167 aa, Unknown
  Description of Unknown: BaiI Pasolli 15211 LouisS 2016 AS60 3 bin.9.fa GHGEBOMP 00436 sequence
MSIKVIPEDPKMRELIEEVMLKVREQKYTPEQLCEVRRVIDAQHFYWWCMDMKREEWAGSDLFTEDFSYYCFGPQKVTGKEQAERSKHVNANMATTHMGHQPLVWLMDENNARAIFMYEDHNMYKDDGTLVRGWAIYIDDFVRGEDDKWRMKTLRLNYLKMDGRYRM

SEQ ID NO: 173 - protein, 168 aa, Unknown
  Description of Unknown: BaiI Pasolli 15211 LouisS 2016 AS60 3 bin.9.fa GHGEBOMP 01422 sequence
MTIPADKEITQLVREILTEAGKGYTPEQLAEIPNILASKYKYWWCIDMQMWDLLPDVYTEPFEAYSNGRLVPNKCIQDQVDRAAVVCDDSMVPTHMGHNAIVQFTGERSCRVLTRLNDYHTYKDDGSTYEGWALYVDDMVKCDDGVWRIKTLRLTYRKILGKLRTMGV

SEQ ID NO: 174 - protein, 168 aa, Unknown
  Description of Unknown: BaiI Pasolli 15202 Bengtsson-PalmeJ 2015 TRAVELRES21 bin.108.fa KLDDHOPD 00157 sequence
MTIPADKEIIGLVHEILSEAGKGYTPEQLAEIPNILATKYKYWWCIDMQMWDLMPEVYTEPFEAYSNGRLVPNKCIQDQVDRAAVVCNDSMVPMHMGHNAIVQFTGERSCRLLTRLNDYHTYKDDGSTYEGWALYVDDMVKCDDGVWRIKTLRLTYRNILGKLRTMGV

SEQ ID NO: 175 - protein, 182 aa, Unknown
  Description of Unknown: BaiI Pasolli 15202 Bengtsson-PalmeJ 2015 TRAVELRES21 bin.108.fa KLDDHOPD 00160 sequence
MAVFNIPFNEEFRSMVVDVMKHVRRQQYTPEMLCEHQKILECMHFYWWSMDMKKEEYATELFDDDFQYWNGRPGTTDKKQQALVSKWCNKNMQTMHMGHQPMIWIQDETHARGIFQYEDHMCYFDDASVCEGWAVYCEDFVKRDGVWYISRHRMAYRQMDGTYKNPFPPKDWVPEDWEEPNY

SEQ ID NO: 176 - protein, 168 aa, Unknown
  Description of Unknown: BaiI Pasolli 15002 LiJ 2014 V1.FI04 bin.94.fa MJMNNJHI 00331 sequence
MNIPADKQMIKLCREVLAEAGKPYTPEQLAEIPAILAAKNKYWWCIDMQLWDVMPEVFTEPFKAYSNGRLVPNKSLMDQVKRASVVCNDTMVPTHMGHNPIVCFTGENSCRLLTRLNDYHTYKDDDSTYEGWGMYIDDLVKCPDGIWRIKTLRLTYRKILGALRTKGV

SEQ ID NO: 177 - protein, 184 aa, Unknown
  Description of Unknown: BaiI Pasolli 15002 LiJ 2014 V1.FI04 bin.94.fa MJMNNJHI 02191 sequence
MATQAVPFDKKFGEMVLEVIKNVRRQEYTPEQLCQLQKVIECKYFYWWAMDMKKEEYAMELFTDDFAYYMGRHLVTKNKRTQSLNAKWSNKDMQTMHMGHQPMVWLIDDTHARGVFQYEDHMVYFDDGQVVEGWMVYCDDFVKCEDGAWRISRLRMAYREMDGSYRDPIPPKGWEPENWEEPNY

SEQ ID NO: 178 - protein, 184 aa, Unknown
  Description of Unknown: BaiI Pasolli 15265 LiuW 2016 SRR3992994 bin.12.fa OBMFBIGE 01187 sequence
MATRNIPFPDKVRDMVLDVIKHVRRQEYTPEQLCQLQKIIECKYFYWWCMDMKKEEYVMELFTDDFRYYLNGHLAVKDKLLQARNAKWCNKDMQTMHMGHQPMIWLIDDTHARGVFQYEDHMCYYDNSEVLQGWLVYCDDFVKGDDGAWRIQKLRMAYREMDGSFRSTMVPKDWMPDEWDTPNY

SEQ ID NO: 179 - protein, 184 aa, Unknown
  Description of Unknown: BaiI Pasolli 4621 Obregon-TitoAJ 2015 NO11 bin.28.fa ODBMCAMJ 01791 sequence
MKVIKQDMTIKKMVVEVMKHARSQSYTPQQLCERQKIIDAQFFYYWAMDMKKEEYICDLFTEDFTYRCYVENKTAPKDQAMRSKYVNRNMMTMHMSHNPLIWLISDTEARGIFLYEDNNTYRESKQTAEGFSVYCDDFRKCEDGIWRISTMRIGYRKMEGELEDYDVPEGWTPKSWEEWRCGQE

SEQ ID NO: 180 - protein, 184 aa, Unknown
  Description of Unknown: BaiI Pasolli 15003 XieH 2016 YSZC12003 35390 bin.5.fa PIKIEFGP 01623 sequence
MATQAIPFDKKFGEMVLEVVKNVRRQEYTPEKLCQLQKVIECKYFYWWAMDMKKEEYATELFTDDFAYYMGRRLVAKDKRAQALNAKWSNKDMQTMHMGHQPMVWLIDDTHARGVFQYEDHMVYFDDGQVVEGWMVYCDDFVKCEDGAWRISRLRMAYREMDGSYRDPIPPKGWQPEDWEEPNY

SEQ ID NO: 181 - protein, 168 aa, Unknown
  Description of Unknown: BaiI Pasolli 15003 XieH 2016 YSZC12003 35390 bin.5.fa PIKIEFGP 01708 sequence
MNIPADKQMIKLCREILADAGKPYTPAQLAEIPAILAAKHRYWWCIDMQQWDIMADVFTEPFKAYSNGRLVPNESLMDQVKRASVVCNESMVPMHMGHNAIVHFTGENSCRLLTRLNDYHTYKDDDSTYEGWAMYIDDMVKCPDGVWRIKTLRLTYRKILGALRTKGV

SEQ ID NO: 182 - protein, 181 aa, Clostridium hiranonis
MKIIKKDSTIEELVIEVMKNVRCQKYNSEKLCALQNIIDTQFFYYWSMDMKKEEYACDLFTDDFVYRCFSEAPTEPKSQALRSKFVNRNMMTMHMSHNPLVWLINDTEARGIFLYEDNNTYTDGDTVEGFSMYCNDFRKCEDGIWRISKMRIAYRKMNGKLHDFDIEEGWTPDEWEEWKAK

SEQ ID NO: 183 - protein, 184 aa, Unknown
  Description of Unknown: BaiI Pasolli 15265 ERR1620327 bin.47 BPCKCDAK 00037 sequence
MATRNIPFPDKVRDMVLDVITHVRRQEYTPEQLCQLQKIIECKYFYWWCMDMKKEEYMMELFTDDFRYYLNGHLTVKDKLLQARNAKWCNKDMQTMHMGHQPMIWLIDENHARGVFQYEDHMCYYDDCEVLQSWMVYCDDFVKGEDGAWRIQKLRMAYREMDGNFRTTMVPRDWVPDAWDTPDY

SEQ ID NO: 184 - protein, 184 aa, Unknown; identical to SEQ ID NO: 183
  Description of Unknown: BaiI Pasolli 15265 ERR1578621 bin.18 HPOHBHHF 00912 sequence

SEQ ID NO: 185 - protein, 184 aa, Unknown; identical to SEQ ID NO: 179
  Description of Unknown: BaiI Pasolli 4621 SRR2726241 bin.48 LDBMBPGB 02759 sequence

SEQ ID NO: 186 - protein, 182 aa, Unknown; identical to SEQ ID NO: 175
  Description of Unknown: BaiI Pasolli 15202 ERR1913015 bin.15 PGCAENMN 00643 sequence

SEQ ID NO: 187 - protein, 534 aa, Clostridium hiranonis
VFTINQKRIDFKRGRQNTDMNDVKCKYFNKFNTGMSDFVTPGKQLEYVAKCKPDEKAIIYIDKEDNVRDITWKELHIASNKLAWHLMKKGFGKGQVAMVSFPNGIEHILATLAVWKTGGCYMPVSCKITDTELGDICRIIKPTVSFTDKEMPCRTESIKIGSVFDVCKDESEEMPEDIAANPNMISPSGGTTGEPKFIKQNVASGLSDEIIKSWFEMSGMEFEQRQLLVGPLFHGAPHTAAFNGLFVGNTLIIPRNLRPESIVRYIKEYKIEFIQMIPTLMNRIIKLADVDKEDFKSIKALHHTGGYCSPYLKEKWIDIIGAEKVHEMYSMTEAIGITCIRGDEWLKHYGSVGLPLGGSRISIRDEEGNELGPHEVGEIHMTSPSACCMTEYINHKPLETKDGGFRSVGDFGYVDEDGYLYFSDRRSDMLVIGGENVFATEVETVLTAYEKVVDAVVVGIPDEEWGRRLHAIVQKKEEVSAEELIEYLGKHLLPYKVPKSFTFVPCIPRGDNGKVNRDKMLKGLIEKNLVNKVC

SEQ ID NO: 188 - protein, 646 aa, Clostridium hiranonis
GKFRRSKMSYDALFSPFKIRGLELKNRIVLPGMNTKMAKNKHDLSDDMIAYHVARAKAGCALNIFECVALCPAPHAYMYMGLYNDNHVAQLKKLTDAVHEVGGKMAVQLWHGGFSPQMFFDKTNTLETPDTITVERIHEIVKEFGEGARRAVEAGFDAVEFHAAHSYLPHEFLSPGMNKRTDEYGGNFENRCRFCFEVVEAIRANIPEDMPFFMRVDCIDELMDEVMTEEEIVEFINRCADLGVDVADLSRGNAQSFATVYEVPPFNLQHGFNIENIYNIKKQIKIPVMGVGRINTGEMANQVIADGKFDLVGIGRAQLADQDWVAKVREGKEDLIRHCIGCDQGCYDAVINPQMTHITCTRNPHLCLEYKGMPKTDEPKKVMIIGGGMAGILAAEVLKKRGHEPVIFEASDHLAGQFVLAGKAPMKEDWAAAAKWEAEEVARLGIEVRYNTKVTPELIEEFAPDHVVIAIGSDYVAPAIPGIDSDKVYTQYQVLKGEVEPKGHVAVVGCGLVGTEVAQYLAARGAQVTAIERKGVGTGLSMLRRMFMNPEFKYYKINKMSGTNIVGIEPGKLHYIMTNKKTQEVTEGVLECDAAVICTGITARPSEDLQEKCKELGVPFNVIGDAAGARDARIATQEGYEVGMSI

SEQ ID NO: 189 - protein, 179 aa, Clostridium hiranonis
KLLNYKKEANKMTLEARIEALEKEIQRLNDIEAIKQLKAKYFRCLDGKLWDELETTLSPNIETSYSDGKLVFHSPKEVTEYLAAAMPKEEISMHMGHTPEITIDSENTATGRWYLEDNLIFTDGKYKNVGINGGAFYTDKYEKIDGQWYIKETGYVRIFEEHFMRDPKIHITSNMHKEK

SEQ ID NO: 190 - protein, 263 aa, Clostridium hiranonis
SFKILIKVEGDKTMNLVQDKIVIITGGTSGIGLCAAKIFMDNGATVSIFGKTQEEVDAAKAELKETHPDKEVLGFAPDLTNRDEVMAAVGAVAEKYGRLDVMINNAGVTSSNVFSRVSPEEFKYLMDINVTGVFNGAWAAYQCMKGRKEGVIINTASVTGIHGSLSGVGYPTSKSAVVGFTQALGREIIRKNIRVVGVAPGVVNTPMVGNIPDEILDGYLSSFPMKRMLEPEEIANTYLFLASDLASGITATTVSVDGAYRPS

SEQ ID NO: 191 - protein, 432 aa, Clostridium hiranonis
KKRRNKMAGLKDFPKFGALSGLKILDSGSNIAGPLGGGLLAECGATVIHFEGPKKPDNQRGWYGYPQNHRNQLSMVADIKSEEGRKIFLDLIKWADIWVESSKGGQYDRLGLSDEVIWSVNPKIAIVHVSGYGQVGDPSYVTKASYDAVGQAFSGYMSLNGVNEALKINPYLSDFVCGLTTCWAMLACYVSTQLTGKGESVDVAQYEALARIMDGRMIQYATDGVSVPKTGNKDAQAALFSFYTCKDGRTIFIGMTGAEVCKRGFPVIGLPVPGTGDPDFPEGFTGWMINTPVGQRMEKAMEAFVAERTMPEVEKAMIDAQIPCQRVYDLEDCLNDPHWNARGTIMEWDDPMMGHIKGLGLINKFKNNPSEIWRGAPLFGMDNRDILRDLGYSEEEVNDLYAKGIVNEFDLETTIKRYKLDQVIPHMAKKDK

SEQ ID NO: 192 - protein, 484 aa, Clostridium hiranonis
KLLKFYTRRIEMTATNANYKKGFIPFAIAALLVGLIGGFTAVLAPAFVADMGLNDNNTTWIALALAMSTAACAPILGKLGDVLGRRKTLLLGIIVFTIGNVLTAIASSLIFMLGARFIVGVGTAAIAPVIMAYIVTEYPPEETGKGFALYMLISSAAVVVGPTCGGLIMQAFGWRMMMWVCVALCVVTFFICSVMIKKTDFEKKSLDNFDKKGAVCVLIFFSLVLCIPSFGQNIGWTSAPFLGVTAVALVTLFLLIKAESSAENPILSGKFMKRKEFILPVLILFLTQGLMQANMTNVILFVRATQPENTIISSFAISILYIGMSLGSVFIGPMADKKEPKTVLTGSLLFTGIGCAMMYFFTETAPFAMLAGSLGMLGIGLGGNATILMKVSLSGLSQAEAGSGTGTYGLFRDISAPFGVAVFVPLFANTVTTRMAGVMANGTAEAAAKSLASVSSIHTLALVEVCCVILAIVAVRMLPKIHNK

SEQ ID NO: 193 - protein, 675 aa, Clostridium hiranonis
KNKNKIKAKGKNNIMDMKNSKLFSPLTIGSLTLNNRVGMAPMSMDYEAADGTVPKRLADIFVRRAEGGTGYVTIDAVTIDSKYKYMGNTTALDSDDLVPQFREFATRVREAGSTLIPQVIHPGPESICGYRHIAPLGPSVNTNANCHVSRAISVDEIHEIIKQFGQAARRVEEAGCGGIGLHCAHAYMLPGSFLSPLRNKRMDEYGGCLDNRARFVIEMIEEVRRNVSPDFPIMLRISGDERMIGGNSLEDMLYLAPKFVEAGVNMFEVSGGTQYEGLEHIIPSQNKSIGVNVHEASEIKKVVDVPVYAVGKINDIRYAAEIVERGLVDGVSIGRPLLADPDLCNKAKENLFDEITPCASCGGSCISRTADRPQCRCHINPRVGFEYDYPEVPAEKSKKVLVVGAGPGGMMAAVTAAERGHDVTLWEADTQIGGQINLAVVAPGKQEMTKWLSHLNYRAKKAGVKMVLGKEATVENIKEFAPEAVIVATGARPLVPPIKGTQDYPVLTAHDFLRGKFVIPKGKVCVLGGGAVACETAETVLENARPNAFTRGFDASIGDVDVTLVEMLPQLLTGVCAPNRTPLIRKLKNKGVHINVNTKILEVTDHDVKVQRADGAEEWLKGFDYILFGLGSRNYDPISEQIKEFVPEVHVVGDAKRARQASFAMWEAFEAAYSL

SEQ ID NO: 194 - protein, 189 aa, Clostridium hiranonis
IFCIWRLIMKIIKKDSTIEELVIEVMKNVRCQKYTSEKLCDLQNIIDTQFFYYWSMDMKKEEYACDLFTDDFVYRCFSEAPTEPKSQALRSKFVNRNMMTMHMSHNPLVWLINDTEARGIFLYEDNNTYTDGDTVEGFSMYCNDFRKCEDGIWRISKMRIAYRKMNGKLHDFDIEEGWTPDEWEEWKAK

SEQ ID NO: 195 - protein, 448 aa, Clostridium hylemonae
KENIEMEGTGLNNFPQFGVLAGVKILVCGGAIAGPFGATLLGEIGAEVVHLESPKNPDSTRGHYGYSQNHRNQISMVADMKTPEGLEIFKKLIKWTDIFIESSKGGTYEKMGLTDEVLWEVNPGLVIVHVSGFGQTGVPEYISRASYDAVGQAFSGYMSFNGTPKEALKISPYLSDYVTALNTCWTALAAYVHVLRTGRGEAVDVAQYESLARILDTRPIEYFTDGKEFPRTGNKDSQAALFSFYTCKDGGTIFIGMNGYGPVHRGYPLIGLPKPGDGDPEIDQIISGWMADTDLGRRLEAAMEKFVSEHTVDEVEKIMLENQIPCQKVYSLEDCVRDPHWKAREIFTEWDDPMMGRVKGIGIVNKWKNNPGEIKWGAPLFGENNKEVLRDLGYTEEETEDLARRGITACLDFEQTYETYKLGELFPHYREGFTEHWKTEQEDETYEI

SEQ ID NO: 196 - protein, 295 aa, Clostridium hylemonae
SGRTRTNQVVICSVFIQCHNVLSVKVISIKVLAHISKAKRRKGRKFMKLVQDKITVITGGTRGIGFTAAKIFIENGAKVSIFGETKEEVDTALAELKELYPEEEVLGFAPDLTSRDAVMAAVRAVAEKYGRLDVMINNAGITMNTVFSRVTEEAFKHMMDINVIGVFNGAWAAYQCMKGAQQGVIINTASVTGIYGSLSGIGYPASKAGVIGLTQGLGREIIRKNIRVVGVAPGVVDTDMTKGLPPEILEDYLKSFPMKRMLKAEEIANVYLFLASDLASGITATTVSVDGAYRP

SEQ ID NO: 197 - protein, 522 aa, Clostridium hylemonae
SYIKGGRNMDLMGDFFNKFNLGTSDFVTPGKQLQYISKHKAYTTAVICIDKDQTVSEITWKQLHTRSNQLAWMLGEYGIKERATVIVAYPNSIEHLIAAFAIWKAGACYMPISSKTAGAELDEISRIINPAGAFADFAVPDTEFCLNSGEMYEVMRQYPEKTPPDVRSDPNMISPSGGTSGKLKFIRQNMPGGMTDSMLKGWFEMSGMDFEQRQLLVGPLFHGAPHSSAFNGLFAGNTLVIPRNLCPDNICRLIKEYKIEFIQMVPTLMNRIVKLPGIRKEDFASVKALFHTGGYCAPYLKRKWMELLAPEKIYEMYSMTEVIGMTCIRGDDWLKHPGSIGLPVGEGKVSIRDESGKELAPYELGDIYMSSPGECFLTEYINHEPLKVSDGEYRSVGDIGYVDEEGYLYFSDRRSDMLVIGGENVFAAEVEAALVRHSKVADAVVIGIPDEEWGRRLHAVVEARQEIPADELRAFLGQYLSPYKIPATFEYVKTIERGDNGKADRKRIFEDCLSREKCSCKE

SEQ ID NO: 198 - protein, 641 aa, Clostridium hylemonae
TMGYEALFSPFKVRGLELKNRIILPGMNTKMTKNKHDVGDDMIAYHVARAKAGCALNIFECVALCPAPHAYMYMGLYNDHHVRQLRRLTDAVHEAGGKMGIQLWHGGFSPQLFFDETNTLETPDTLSAGRIHEIVEEFGCGARLAVQAGFDAVEFHAAHSYLPHEFLSPGMNRRTDEYGGSFENRCRFCFEVISAIRSNIPEDMPFFMRVGCIDELMEQNMTEEEIVEFINRSADLGVDVADISRGNAMSFATVYEVPPFNLPHGFNIENIYNIKKQIKIPVVGVGRINTGEMANQVIEDGKFDLVAIGRAQLADPEWVTKVREGREELIRHCIGCDQGCYDAVIDPKMKHITCTRNPMLCLEYKGLPKTAAPEKVMIAGGGMAGLFAAEVLKKRGHEPVIFEASDRLAGQFTLAGVSPMKQDWAAAAKWEAEEIGRLGIEFHLNTPVTPKLIEQFAPDRVIIATGSEYTAPAIPGIDGPNVYTQYEVLRGEASPAGHVAVIGCGLVGAEVAELLASRGAQVTALEKKGVGTGLNMLRRMFLNPEFKYYKIAKMSGALVTSLEPGMVNYEITDRKTKEVSRGTLKCDAAVICTGITARPCGKLKETCEAAGIPVQVIGDALAARDARTASREGYEAGMALQ

SEQ ID NO: 199 - protein, 175 aa, Clostridium hylemonae
TERKKIMSIEERLEALEKEIQKMKDIEEIKKLKGQYFRCLDGKFWDELETTLSPNIVTSYSNGKLVFHGPKEVTDYFKKAMPREEISMHMGHTPEITIDSETTATGRWYLEDKLIFTEESKYAGSGVNGGAFYTDKYEKVDGKWYILETGYLRVYEEHFMRDPKIKITMNMHKTK

SEQ ID NO: 200 - protein, 439 aa, Clostridium hylemonae
TCTKQNNKRKRRKINMAGLKDFPSFGALAGLKILDSGSNIAGPLGGGLLSECGATVIHFEGPKKPDNQRGWYGYPQNHRNQLSMVADIKTEEGREIFMKLIKWADIWVESSKGGQYDRLGLSDEEIFKVNPKIAIVHVSGYGQTGDPSYVTRASYDAVGQAFSGYMSLNGTTEALKTNPYLSDFVCGLTTCWAMLACYVSTVLTGKGESVDIAQYEALARIMDGRVMQFATDGVKVPRTGNKDGQAALFSFYTCKDGRTIFIGMTGAEVCKRGFPIIGLPQPGSGDPDFPEGFTGWLIDSPVGRRMEAAMEKYVSEHTMEEVEAVMQENQIPCQRVYELEDCISDPHWIARETITEWDDPMLGHVTGLGLINKFKNNPSKIWRGAPLFGMDNRDILRDLGYTDEEIDGLYEKGITNEFDRETTIKRYRLKEVIPHMKDE

SEQ ID NO: 201 - protein, 479 aa, Clostridium hylemonae
RREIMNTAIRSNYKKGFVPFGIAALLVSLIGGFTAVLGPAFVADIGIDYSNTTWISLALAMSTAACAPILGKLGDILGRRTTLLLGILVFTAGNALTAVATSLAFMLAARFIVGIGTAAISPVVMAYIVTEYPPEETGKGFAVYMLISSGAVVIGPTCGGLIMNAAGWRAMMWVCVALCAAVFLICMFTIKKTAFQKKKMTDFDRAGSVLVLIFFSLFLCIPSFGQNIGWSSVQFIAVASVAAVSLICLVFVERKAGSPVFNGQFMARKAFILPVIILFLTQGLMQANMTNVIVFVRYTQPDNVIISSFAISIMYIGMSLGSVIIGPMADKKEPRTVLTFSLLLTGVGCGIMYFFTAESSVAIFAAALGILGVGLGGNATIFMKVALSGLSSEVAGSGTGTYGLFRDISAPFGVAVFVPLFTNGVTSRMTEAVAGGASEGAATLLAAVSSIKTLTVIELGCIVAGIAAVRMLPRIHENN

SEQ ID NO: 202 - protein, 693 aa, Clostridium hylemonae
PSSSLAVSLPALPRSGCCREYMRTIKEKRYVLMDMKDSKLFSPLKVGSLTLKNRVGMAPMSMDYEAEDGTVPKRLADIFVRRAEGGTGYVVIDAVTVDHNYQYIGNTTCLDSDDLVPQFKVFADRVSAAGSTLIPQIIHPGPESICGFRKIPPLGPSVNTNANCHVSRSVSIEEIHTIIRQFGAAARRVQEAGCGGISLHCAHAYMLPGAFLSPLRNKRMDEYGGCLDNRARFILEVIEEVRKNVSADFPVFLRISGDERAEGGNSLEDMLYLAPKFEAAGVDLLEVSGGTQYEGLEYIIPSQGKRIGMNIYEAAEIKKVVGIPVYAVGKINDIRYAADIVERGIVDGVAVGRPLLADPDLCKKAKENRFDDITPCGSCGGSCITRTAQSPQCRCHINPLVGREYDFPAVPAQRSKKTLVIGAGPGGMYAAVTAAERGHDVTVWEAEDQIGGQLNLAVVSPGKQEMTKWLVHLNHRAKKAGVTFEFGKEATAEAVREFAPEAVIVATGARPLVPPIKGTKEYPVLTAHDFLRGRFVIPKGRVCVLGGGAVACETAETILANARPTAFTRGYDASIGDVEVTLVEMLPQLLTGVCEPNRAPMLRSLKKSGVHIKVNTKILEVTDHDVKVQQGDGTEEWLRGFDYILFGLGSRNYDPLSETLKEFVPEVHVIGDAVRARQASFAMWEGFEAAYSL

SEQ ID NO: 203 - protein, 201 aa, Clostridium hylemonae
SCLQSVEIRQYGSLYEEGYMSVKIISKDEKDRELIMETVRNARNQDYTPEMLCELQKVIETKYYYWWLMDMKGEEYAPDLFGRNFHYFCNGHLVTDDGAYQALTSKWVNSAMVTMHMGHQPLVWLMDENNARGVFQYEDHHVYKEDDSVVETWMVYCDDFEKDSGGTWHITRMRMYQKQADGRYRDPFPPKDWVPEGWKES

SEQ ID NO: 204 - protein, 525 aa, Clostridium hylemonae
STKPCSKGERNMDLMGDFFNKFNLGTSDFVTPGKQLQYISKHKAYTTAIIYIDKDESVSEITWKQLHTRSNQLAWMLKDSGIKEGSVVMVAFPNSIEHIIAAYAIWKAGACYMPISSKTAESELAEICEVISLSGAFTDFDVPDVKFRVASKEMYKVMEQYPEKTLPDVKADPNMISLSGGTSGKLKFIRQNMPSGMTDGMLQSFFAMSGMDFEMRQLLVGPLFHGAPHSTAFNGLFAGNMLVITRNLCPDNIVKLIKEYKIEYIQMVPTLMNRISKLPGIRKEDFETIKVLNHTGGYCAPYLKRKWIELLAPEKVYEMYSMTEVIGMTCIRGDDWLKHPGSVGLPVGGGQISIRDESGKELPPYELGDIYMTSPGECFVTEYMNHEPLEVSDGGFRSVGDIGYVDEEGYLYFSDRRSDMLVIGGENVYAAEVEAALVRHRKVIDAVVIGIPDEEWGRRLHAVVEVADKIPAEELRSFLGQYLSPYKIPGTFEYVNTIRRGDNGKADRKRILSECLEREQCLCGS

SEQ ID NO: 205 - protein, 640 aa, Clostridium hylemonae
KMGYEALFSPFKVRGLELKNRIILPGMNTKMTKNKHDVGDDMIAYHVARAKAGCALNIFECVALCPAPHAYMYMGLYNDHHVSQLRKLTDAVHEVGGKMGIQLWHGGFSPQLFFDETNTLETPDTLTVERIHEIVEEFGRGAKLAVQAGFDAVEFHAAHSYLPHEFLSPGMNKRTDEYGGNFENRCRFCFEVIKAIRENIPEDMPFFMRVGCIDELMEENMTEEEIVEFINRSADLGVDVADISRGNAMSFATVYEVPPFNLPHGFNIENIYNIKKQIKIPVVGVGRIDTGEMANKVIEEGKFDLVAIGRAQLVDPEWVTKVREGREELIRHCIGCVQGCYDAVINPKMKHITCTRNPMLCLEYKGLPKTDTPKKVMIAGGGMAGLLAAEVLKKRGHEPVIYEASGALAGQFPLAGISPMKQDWAAAAKWEAEEIGRLGIEFHLNTAVTPELIDDSAPDHVIIATGSEYVAPAIPGVDGPNVYSQYEVLKGEAKPAGHVAVIGCGLVGVEVAELLASRGVQVTAIEKKGVGTGLNMLRRMFMNPEFKHYKIAKMSGALVTSLEAGKVHYEITDRKTKEVSQGTLECDAAVICTGITSRPCEALKAKCEASGIPVQVIGDAAAARDAREATFEGYEAAMSL

SEQ ID NO: 206 - protein, 190 aa, Clostridium hylemonae
GGNVTVKAKVITIMKKERMTDMSIEERLEALEKEIQRLKDIEEIKKLKGQYFRCLDGKFWDELETTLSPNIVTSYSDGKLVFHGPKEVTDYFKKTMPKEEISMHMGHTPEITIDSDTTATGKWYLEDKLIFTEGSKYAGAGVNGGAFYTDKYEKVDGKWYILETGYLRVYEEHFFRDPKINITMNMHKTK

SEQ ID NO: 207 - protein, 447 aa, Clostridium hylemonae
SEDQYNDEHAQNKIIKEKRRNEKMAGLKDFPKFGALAGLNILDSGSNIAGPLGGGLLAECGATVIHFEGPKKPDNQRGWYGYPQNHRNQLSMVADIKSEEGRDIFLKLIQWADIWVESSKGGQYDRLGLSDEEIWKVNPKIAIVHVSGYGQTGDPSYVTRASYDAVGQAFSGYMSLNGTTEALKINPYLSDFACGLTTCWAMLACYVSTILTGKGESVDIAQYEALARIMDGRVMQFATDGVKVPRTGNKDGQAALFSFYTCKDKRTIFIGMTGAEVCKRGFPVIGLPVPGSGDPDFPEGFTGWLIDSPVGRRMEAAMEKYVAEHTMEEVEAVMQENQIPCQRVYELEDCISDPHWKARETITEWDDPMLGHVTGLGLINKFKNNPSKIWRGAPLFGMDNRDILRDLGYTDEEIDGLYAKGITNEFDRDTTIKRYRLKEVIPHMKDE

SEQ ID NO: 208 - protein, 479 aa, Clostridium hylemonae
RREIMNTATKSNYKKGFVPFAIAALLVSLIGGFTAVLGPAFVADIGIDYSNTTWISLALAMSTAACAPILGKLGDVLGRRTTLLLGILIFTAGNALTAVATSLAFMLAARFIVGIGTAAISPVVMAYIVTEYPPEETGKGFAVYMLISSGAVVVGPTCGGLIMNAAGWRVMMWVCVTLCAAVFFICMFMIKKTAFQKRKLTDFDRIGSVLVLIFFSLLLCVPSFGQNIGWGSVQFISVAAVAAVSLLCLILVEKKAGNPIFNGKFMARKAFILPVIILFLTQGLMQANMTNVIVFVRYTQPDNVIISSFAISIMYIGMSLGSVIIGPMADKKEPRTVLTFSLLLTGIGCGIMYFFTEGSSVAIFAAALGILGVGLGGNATIFMKVALSGLSNEVAGSGTGTYGLFRDISAPFGVAVFVPLFTNGVTSRMAEAVAGGASEGAATLLAAVSSIKTLTIIELGCVAAGIVAVRMLPRIHEKN

SEQ ID NO: 209 - protein, 693 aa, Clostridium hylemonae
PSSSLAVWQPVLSQSECCREYMRRIKEKRYFYMDMKDSKLFSPLKVGSLTLKNRVGMAPMSMDYEAEDGTVPKKLADIFVRRAEGGTGYVVIDAVTVDRNYQYIGNTTCLDSDSLVPQFKEFADRVSAAGSTLIPQIIHPGPESICGFRKIPPLGPSVNTNANCHVSRSISIDEIHTVIRQFGAAARRAEEAGCGGISLHCAHAYMLPGAFLSPLRNKRMDEYGGSLDNRARFIIEVIEEVRRNVSADYPVFLRISGDERAEGGNSLEDMLYLAPKFEAAGVNLLEVSGGTQYEGLEYIIPSQSKRIGMNIYEAAEIKKVVGIPVYAVGKINDIRYAADIVERGIVDGVSMGRPLLADPDLCSKAYENRFDDITPCGSCGGSCITRSAQSPQCRCHINPLVGREYDFPDVPAKKPKKTLIIGAGPGGMYAAVTAAERGHNVTVWEADDNIGGQLNMAVVSPGKQEMTKWLVHLNYRAKKAGVGFEFGKEATVEEVRRFAPDAVIVATGARPLVPPIKGTKEYPVLTAHDFLRGRFVIPKGRVCVLGGGAVACETAETILANARPTAFTRGYEASIGDVEVTLVEMLPQLLTGVCEPNRAPMLRKLKKGGVQINVNTKILEVTDHDVKVQRGDGTEEWLKGFDYILFGLGSRNYDPLSESLKEFVPEVHVIGDAVKARQASYAMWEGFEAAYGL

SEQ ID NO: 210 - protein, 200 aa, Clostridium hylemonae
GPAVFGPGTRVGKKEVEKMAVKIISGEQKDEALLMEVIENARKQNYTPDMLCELQKVIETKYYYWWLMDMKKEECARELFAEDFHYYYNGRLATDDRAAQAKTSKWTNSALVTMHMGHQPMVWIMDETHARGVFQYEDHHVCKEDDSVIETWMVYCDDFKKYEDGSWHISTMRMYPKQADGRYRNPFPPDGWMPEGWEDD

SEQ ID NO: 211 - protein, 449 aa, Clostridium hylemonae
KENEIMEGTGLNNFPQFGVLAGVKVLVCGGAIAGPFGATLLGETGAEVVHFESPKNPDSTRGHYGYSQNHRNQISMVADMKTEEGLEIFKKLIRWTDIFIESSKGGTYEKMGLTDEVLWELNSRLVIVHVSGFGQTGVPDYIRRASYDAVGQAFSGYMSFNGTPEEALKVSPYLSDYVTALNTCWTALAAYIHALRTGKGESVDVAQYESLARILDTRPIEYFTDGREFERTGNKDSQAALFSFYTCKDGGTIFIGMNGNGPVHRGYPIIGLPKPGDGDPEIDQVISGWVADSDLGRRLEAAMEEFVSQHTVDEVEKVMLENQIPCQKVCSLKDCAEDPHWKAREVFAEWDDPMMGKVKGLGIVNKWKNNPGEIKWGSPLFGENNTEVLRDLGYTDEEIEDFARRGITASFDWKQTYEIYKLEELFPHYREGFTEHWKKEAEKTSKQKK

SEQ ID NO: 212 - protein, 250 aa, Clostridium hylemonae
FMNLVQDKITVITGGTRGIGFKAAQIFIDNGAKVSIFGETQEEVDTALAELKELYPEEEVLGFAPDLTSRDEVMAAVGKVAEKYGRLDVMINNAGITMNDVFSRVTEEAFKHIMDVNVIGVFNGAWAAYQCMKEAKQGVIINTASVTGIYGSISGIGYPTSKAGVIGFTHGLGREIIRKNIRVVGVAPGVVDTDMTKGLPPEILEDYLKSFPMKRMLKTEEIANVYLFLASDLANGITATTISVDGAYRP

SEQ ID NO: 213 - protein, 532 aa, Clostridium hylemonae
STKPCSKGERNMNLMGDFFNKFNLGTSDFVTPGKQLQYISKHKAYTTAIIYIDKDQSVSEITWKQLHTRSNQLAWMLKEHGIKEGSVVMVAFPNTIEHIIAAYAIWKVGACYMPISSKTAESELAEICEVISLSGAFADFDVPDANFCVGSREMYQVMEPYPEKTLPDVKADPNMISLSGGTSGKLKFIRQNMPSGMTDGMLQDFFAMSGMDFEMRQLLVGPLFHGAPHSSAFNGLFAGNTLVITRNLCPDNIVKLIKEYKIEYIQMVPTLMNRISKLPGIGKDDFESIKVLNHTGGYCAPYLKRKWIELLAPEKVYEMYSMTEVIGMTCIRGDEWLKHPGSVGLPVGGGQISIRDESGKELPPYELGDIYMTSPGECFVTEYMNHEPLEVSEEGFRSVGDIGYVDEDGYLYFSDRRSDMLVIGGENVYAAEVEAALVRHGKVIDAVVIGIPDEEWGRRLHAVIEAADEIPAEELRSFLGQYLSPYKIPGTFEYVKTIRRGDNGKADRKRILSECLEREHCLCGNETGCSKN

SEQ ID NO: 214 - protein, 646 aa, Clostridium hylemonae
HISGGLKMGYEALFSPFKVRGLELKNRIILPGMNTKMTKNKHDVGDDMIAYHVARAKAGCALNIFECVALCPAPHAYMYMGLYNDHHVSQLKKLTDAVHEVGGKMGVQLWHGGFSPQMFFDETNTLESPDTLTVERIHEIVKEFGRGARLAVQAGFDAVEFHAAHSYLPHEFLSPGMNRRTDEYGGSFENRCRFCFEVIKEIRENIPDDMPFFMRVGCIDELMEQVMTEEEIVEFINRSADLGVDVADISRGNAMSFATVYEVPPFNLPHGFNIENIYNIKKQIKIPVVGVGRINTGAMANKVIEEGKFDLVAIGRAQLVDPEWVTKVREGREELIRHCIGCDQGCYDAVINPKMRHITCTRNPMLCLEHKGLPKTDTPKKVMIAGGGMAGLLAAEVLKKRGHEPVIFEASGALAGQFTLAGVSPMKQDWAAAAKWEAEEIGRLGIEFHLNTAVTPELIEEFAPDHVIIATGSEYAAPAIPGIDGPNVYTQYEVLKGEAKPSGHVAVIGCGLVGVEVAELLASRGVQVTAMEKKGVGTGLNMLRRMFMDPEFKHYKISKMSGALVTSLEAGKVHYEITDRKTKEVSQGTLECDAVVICTGITSRPCEELKAKCEASGIPVQVIGDAAAARDAREATFEGYEAAMSL

SEQ ID NO: 215 - protein, 190 aa, Clostridium hylemonae
GGNVTVKAKVITIMKKERMTDMSIEERLEALEKEIQRLKDIEEIKNLKGQYFRCLDGKFWDELETTLSPNIVTSYSDGKLVFHGPKEVTDYFKKTMPKEEISMHMGHTPEITIDSDTTATGRWYLEDKLIFTEGSKYAGAGVNGGAFYTDKYEKVDGKWYILETGYLRVYEEHFFRDPKINITMNMHKTK

SEQ ID NO: 216 - protein, 436 aa, Clostridium hylemonae
NEIIKEKRRNEKMAGLKDFPKFGALAGLKILDSGSNIAGPLGGGLLAECGATVIHFEGPKKPDNQRGWYGYPQNHRNQLSMVADIKSEEGRDIFLKLIQWADIWVESSKGGQYDRLGLSDEEIWKVNPKIAIVHVSGYGQTGDPSYVSRASYDAVGQAFSGYMSLNGTTEALKINPYLSDFACGLTTCWAMLACYVSTILTGKGESVDIAQYEALARIMDGRVMQFATDGVKVPRTGNKDGQAALFSFYTCKDKRTIFIGMTGAEVCKRGFPIIGLPVPGSGDPDFPEGFTGWLIDSPVGRRMEAAMEAYVAEHTMEEVEAVMQENQIPCQRVYELEDCISDPHWKARETITEWDDPMLGHVTGLGLINKFKNNPSKIWRGAPLFGMDNRDILRDLGYTDEEIDGLYAKGITNEFDRDTTIKRYRLKEVIPHMKDE

SEQ ID NO: 217 - protein, 479 aa, Clostridium hylemonae
RREIMNTATKSNYKKGFVPYAVAALLVSLIGGFTAVLGPAFVADIGIDYSNTTWISLALAMSTAACAPILGKLGDVLGRRTTLLLGILIFTAGNALTAVATSLAFMLAARFIVGIGTAAISPVVMAYIVTEYPPEETGKGFAVYMLISSGAVVIGPTCGGLIMNVAGWRVMMWVCVALCAAVFFICMFLIKKTAFQKRKLTDFDRIGSVLVLIFFSLLLCVPSFGQNIGWGSVQFISVAAVAAVSLLCLIFVEKKADNPIFNGTFMARKAFILPVIILFLTQGLMQANMTNVIVFVRYTQPDNVIISSFAISIMYIGMSLGSVIIGPMADKKEPRTVLTFSLLLTGIGCGIMYFFTEGSSVAIFAAALGILGVGLGGNATIFMKVALSGLSNEVAGSGTGTYGLFRDISAPFGVAVFVPLFTNGVTSRMAEAVAGGASEGAATLLAAVSSIKTLTIIELGCVAAGIVAVRMLPRIHQKN

SEQ ID NO: 218 - protein, 685 aa, Clostridium hylemonae
QQVLSQFGCCREYIRRIKEKRYFYMDMKDSKLFSPLKVGSLTLKNRVGMAPMSMDYEAEDGTVPKKLADIFVRRAEGGTGYVVIDAVTVDRNYQYIGNTTCLDSDSLVPQFKEFADRVSAAGSTLIPQIIHPGPESICGFRKIPPLGPSVNTNANCHVSRSISIDEIHTVIRQFGAAARRAEEAGCGGISLHCAHAYMLPGAFLSPLRNKRMDEYGGCLDNRARFIIEVIEEVRRNVSPDFPVFLRISGDERAEGGNSLEDMLYLAPKFEEAGVNLLEVSGGTQYEGLEYIIPSQSKRIGMNIYEAAEIKKVVGIPVYVVGKINDIRYAADIVERGIVDGVSIGRPLLADPDLCNKAYENRFDDITPCGSCGGSCITRSAQSPQCRCHINPLVGREYDFPAVPAQKPKKTLVIGAGPGGMYAAVTAAERGHSVTVWEADDTIGGQLNMAVVSPGKQEMTKWLVHLNHRAKKAGVEFVFGKEATVEDVKGFAPDAVIVATGARPLVPPIKGTKEYPVLTAHDFLRGRFVIPKGRVCVLGGGAVACETAETILANARPTAFTRGYEASIGDVEVTLVEMLPQLLTGVCEPNRAPMLRKLKKGGVQINVNTKILEVTDHDVKVQRSDGTEEWMKGFDYILFGLGSRNYDPLSDSLKEFVPEVHVIGDAVRARQASYAMWEGFEAAYGL

SEQ ID NO: 219 - protein, 187 aa, Clostridium hylemonae
KEAEKMAVKIMSREQRDDALIMEVIRNARKQDYTPDLLCELQKVVETKYYYWWLMDMKKEECARELFAEDFSYYYNGYLVTEDGAEQAKTSKWTNSSLVTMHMGHQPMVWLMDQTHARGIFQYEDHHVSIEDGSVIETWMVYCDDFKKYEDGSWHISTMRMYPKQSDGRYRNPFPPDGWIPEGWEQG

SEQ ID NO: 220 - protein, 447 aa, Clostridium hylemonae
TWYYGKENGNMEGTGLNNFPQFGVLAGVKVLVCGGAIAGPFGATLLGETGAEVVHFESPKNPDSTRGHYGYSQNHRNQISMVADMKTEEGLGIFKKLIRWTDIFIESSKGGTYEKMGLTDEVLWELNPRLVIVHVSGFGQTGVPDYITRASYDAVGQAFSGYMSFNGTPEEALKVTPYLSDYVTALNTCWTALAAYIHALRTGKGESVDVAQYESLARILDTRPIEYFTDGKEFPRTGNKDSQAALFSFYTCKDGGTIFIGMNGYGPVHRGYPLIGLPKPGDGDPEIDQIISGWMADTDLGRRLEAAMEKFVSEHTVDEVEKIMLENQIPCQKVYSLKDCSEDPQWKAREVFAEWDDPMMGKVKGLGIVNKWKNNPGEIKWGSPLFGENNAEVLRDLGYTDEEIEDFAKRGITASFDWKQTYDIYKLEQLFPHYREGFTERWKKEDE

SEQ ID NO: 221 - protein, 289 aa, Clostridium hylemonae
TNQVVICSAFIQCHNVLNVKVISIKVLAHKRLIRRKEGKFMNLVQDKITVITGGTRGIGFSAAKIFIDNGAKVSIFGETQEEVDTALAELKELYPEEEVLGFAPDLTSRDEVMAAVGAVAEKYGRLDVMINNAGITMNTVFSRVTEEAFKHMMDINVVGVFNGAWAAYQCMKDAKQGVIINTASVTGIYGSLSGVGYPTSKAGVIGLTHGLGREIIRKNIRVVGVAPGVVDTDMTKGLPPEILDDYLKSFPMKRMLKPEEIANVYLFLASDLANGITATTISVDGAYRP

SEQ ID NO: 222 - protein, 530 aa, Unknown
  Description of Unknown: BaiB midas Lachnoclostridium nov 76594 Lachnoclostridium nov 76594|ERS138182.8080 1 84.3 3065 sequence
HVEKILSIKKMHKKSTCEREGKELKRDFFNKFNLGTSNFVTPGKQLEYVSECKPDSTAVICLDKEQNCSVITWHQLHVYSSQLAWYLIENEIGPGSIVLTMFPNSIEHIIAVFAIWKTGACYMPMSYKAAESEIREACDTIHPNAAFAECKIPGLKFCLSADEIYEAMEGRSKEMPSDRLANPNMISLSGGTSGKMKFIRQNLPCGLDDETIRSWSFMSGMGFEQRQLLVGPLFHGAPHSAAFNGLFMGNTLVLTRNLCPGNILNMIKKYKIEFIQMVPTLMNRLAKLEGVGKEDFASLKALCHTGGVCSPWLKQIWIDLLGPEKIYEMYSMTECIGLTCIRGDEWVKHPGSIGRPVGDCKVSIQDENGREVAPLEIGEIYMTAPASYLVTEYINWEPLEVKEGGFRSVGDIGYVDEQGYLYFSDRRSDMLVSGGENVFATEVETALLRYKDILDAVVVGIPDEDMGRRLHAVIESGKEIPAEELKTFLGQYLTPYKIPKTFEFVRSIRRGDNGKADRKRILEDCIARGV

SEQ ID NO: 223 - protein, 644 aa, Unknown
  Description of Unknown: BaiCD midas Lachnoclostridium nov 76594 Lachnoclostridium nov 76594|ERS138182.8080 1 84.3 3076 sequence
RRSNKMSYEALFSPFKVRGLELKNRIVLPGMNTKMAKNKHDIGEDMIAYHVARAKAGCALNIFECVALCPAPHAYMYMGLYTGHHVEQFKKLTDAVHEAGGKMGIQLWHGGFSPQMFFDETNTLETPDTLTVERIHEIVEEFGRGARLAVQAGFDAVEFHAAHSYLPHEFLSPGMNKRTDEYGGSFENRCRFCYEVVQAIRSNIPDDMPFFMRADCIDELMEQTMTEEEIVTFINKCAELGVDVADLSRGNATSFATVYEVPPFNLAHGFNIENIYNIKKQINIPVMGVGRINTGEMANKVIEEGKFDLVGIGRAQLADPNWITKVREGKEDLIRHCIGCDQGCYDAVINPKMKHITCTHNPGLCLEYQGMPKTDAPKKVMIVGGGMAGMIAAEVLKTRGHNPVIFEASDKLAGQFRLAGVAPMKQDWADAAEWEAKEVERLGIEVRLNTEVTAETIKEFNPDNVIIAVGSTYALPEIPGIDSPSVYSQYQVLKGEVNPTGRVAVIGCGLVGTEVAELLASRGAQVIAIERKGVGTGLSMLRRMFMSPEFKYYKIAKMSGTNVTALEQGKVHYIMTDRKTKEVTQGVLECDAAVICTGITARPSDGLKARCEELGIPVEVIGDAAGARDCTIATREGYDAGMAI

SEQ ID NO: 224 - protein, 207 aa, Unknown
  Description of Unknown: BaiE midas Lachnoclostridium nov 76594 Lachnoclostridium nov 76594|ERS138182.8080 1 84.3 3079 sequence
GNRRRCRRKRLHNRDPRRLRRRNGNLENQNLSIIHIERMIHMTLEERVEALEKELQKMKDIEAIKELKGKYFRCLDGKMWDELETTLSPNIVTSYSNGKLVFHSPKEVTDYLKSTMPKEEISMHMGHTPEITIDSETTATGRWYLEDKLIFTDGKYKDVGINGGAFYTDKYEKIEGQWYILETGYVRIYEEHFMRDPKIHITMNMHK

SEQ ID NO: 225 - protein, 256 aa, Unknown
  Description of Unknown: BaiA midas Lachnoclostridium nov 76594 Lachnoclostridium nov 76594|ERS138182.8080 1 84.3 3084 sequence
KKGRSKIMNLVQDKVTIITGGTRGIGFAAAKIFIDNGAKVSIFGETQEEVDTALAQLKELYPEEEVLGFAPDLTSRDAVMAAVGQVAQKHGRLDVMINNAGITSNNVFSRVSEEEFKHIMDINVVGVFNGAWSAYQCMKEAKKGVIINTASVTGIFGSLSGVGYPASKAGVIGLTQGLGREIIRKNIRVVGVAPGVVNTDMTNGNPPEIMEGYLKALPMKRMLEPEEIANVYLFLASDLASGITATTVSVDGAYRP

SEQ ID NO: 226 - protein, 432 aa, Unknown
  Description of Unknown: BaiF midas Lachnoclostridium nov 76594 Lachnoclostridium nov 76594|ERS138182.8080 1 84.3 3091 sequence
KRRYKNMAGLKDFPKFGALAGLKILDSGSNIAGPLGGGLLAECGATVIHFEGPKKPDNQRGWYGYPQNHRNQLSMVADIKSEEGRKIFLDLIKWADIWVESSKGGQYDRLGLSDEVIWEVNPKIAIVHVSGYGQTGDPSYVTRASYDAVGQAFSGYMSLNGTTEALKINPYLSDFVCGLTTCWAMLACYVSTILTGKGESVDVAQYEALARIMDGRMIQYATDGVKMPRTGNKDAQAALFSFYTCKDGRTIFIGMTGAEVCKRGFPIIGLPVPGTGDPDFPEGFTGWMIYTPVGQRMEKAMEKYVSEHTMEEVEAEMQAHQIPCQRVYELEDCLNDPHWKARGTITEWDDPMMGHITGLGLINKFKRNPSEIWRGAPLFGMDNRDILKDLGYDDAKIDELYEQGIVNEFDLDTTIKRYRLDEVIPHMRKKEE

SEQ ID NO: 227 - protein, 484 aa, Unknown
  Description of Unknown: BaiG midas Lachnoclostridium nov 76594 Lachnoclostridium nov 76594|ERS138182.8080 1 84.3 3097 sequence
ERKRSKSMSTVANPNYKKGFVPFAIAALLVSLIGGFTAVLGPAFVADQGIDYNNTTWISLALAMSSAACAPILGKLGDVLGRRTTLLLGIVIFAAGNVLTAVATSLIFMLAARFIVGIGTAAISPIVMAYIVTEYPQEETGKAFGLYMLISSGAVVVGPTCGGLIMNAAGWRVMMWVCVALCVAVFIICAFSIKKTAFEKKSMAGFDKPGAALVVVFFSLFLCIPSFGQNIGWSSTAFIGAAAVALVALFILVMVEKKAKSPIMNGKFMARKEFVLPVLILFLTQGLMMANMTNVIVFVRYTQPDNVIISSFAISIMYIGMSLGSVIIGPVADKKEPKTVLTFSLVLTAIGCALMYLFKADSSVAIFAASLGILGFGLGGNATIFMKVALSGLSSEVAGSGTGTYGLFRDISAPFGVAVFVPMFANGVTANIAKYASGGMEEGAATVKAAISSIQTLTLVELGCIVVGIILVRMLPRIYQKKEA

SEQ ID NO: 228 - protein, 661 aa, Unknown
  Description of Unknown: BaiH midas Lachnoclostridium nov 76594 Lachnoclostridium nov 76594|ERS138182.8080 1 84.3 3111 sequence
MDMKHSRLFSPLQIGSLTLSNRVGMAPMSMDYEAADGTVPKRLADVFVRRAEGGTGYVMIDAVTIDSRYPYMGNTTALDRDELVPQFKEFADRIKEAGSTLVPQIIHPGPESICGYRHIAPLGPSANTNANCHVSRSISIDEIHDIIKQFGQAARRAEEAGCGAISLHCAHAYMLPGSFLSPLRNKRMDEYGGSLDNRARFVIEMIEEARRNVSLDFPIFLRISGDERMVGGNSLEDMLYLAPKFEAAGVSMLEISGGTQYEGLEHIIPCQNKSRGVNVYEASEIKKVVGIPVYAVGKINDIRYAAEIVERGLVDGVAMGRPLLADPDLCKKAVKGQFDEITPCASCGGSCISRSEAAPECHCHINPRLGREYEFPDVPAGKSKKVLVIGAGPGGMMAAVTAAERGHDVTVWEADDKIGGQLNLAVVAPGKQEMTQWMVHLNYRAKKAGVKFEFNKEATAEDVKALAPEAVIVATGAKPLVPPIKGTQDYPVLTAHDFLRGKFVIPKGRVCVLGGGAVACETAETVLENARPNSYTRGYDASIGDIDVTLVEMLPQLLTGVCAPNREPLIRKLKSKGVHINVNTKIMEVTDHEVKVQRQNGTQEWLEGFDYVLFGLGSRNYDPLSETLKEFVPEVHVIGDAVRARQASYAMWEGFEKAYSL

SEQ ID NO: 229 - protein, 185 aa, Unknown
  Description of Unknown: BaiI midas Lachnoclostridium nov 76594 Lachnoclostridium nov 76594|ERS138182.8080 1 84.3 3114 sequence
EMAVKAISGSDKDQELIIDTLKHARRQEYTPQRLCELQKIIETQYYYWWIMDMKKEEFCLELFDEDFQYYYNGYLASTKPEEQARTSKWVNAPLATMHMGHQPLVWLMDEKNARGIFQYEDHQVYRESGEVVETWMVYCNDFCKDEKGIWHIKTMRMIKRQADGRYHDINPPEGWMPEEWDTCDF

SEQ ID NO: 230 - protein, 259 aa, Unknown
  Description of Unknown: BaiA midas Lachnoclostridium nov 76594 Lachnoclostridium nov 76594|ERS138182.8080 1 84.10 1235 sequence
AKGKERKEKFMKLVQDKITIITGGTRGIGFAAAKIFIENGAKVSIFGETQEEVDTALAQLKELYPEEEVLGFAPDLTSRDAVMAAVGTVAQKYGRLDVMINNAGITMNTVFSRVSEEDFKHIMDINVIGVFNGAWSAYQCMKEAKQGVIINTASVTGIYGSLSGIGYPTSKAGVIGLTHGLGREIIRKNIRVVGVAPGVVDTDMTKGLPPEILDDYLKSFPMKRMLKPEEIANVYLFLASDLANGITATTISVDGAYRP

SEQ ID NO: 231 - protein, 545 aa, Proteocatella sphenisci
SQVRYKVILIFPMNIIFRCYNYNNQRIKISIKIHSEEELILSSSFFNKFNNGQSNFVTAGMQLKYIADYKPDDTAIIYIDKEEKTSFITWSQLYIQSNKLAWMLMEKNIKPGSVIMVAWPNCIEHIIAAFAIWKVGACYLPVSSKTADKEFVEIGDMISPTIAFAEFEVPGVPITLNYKKMYESMEGQSEEMPEDIKADPNMISLSGGTSGNLKLIRQNMPSGISDDILQIWFHMSGMGFEQRQLLLGPLFHGAPHTAAFNGLFSGNTLVIPRNLCAGNIVRLIKKYQIEYAQMVPILLNRIIKIPGLKIEDFDSIKAICHTSGYCSDWLKKRWIDLLGPEKIHEIYSMTEVIGLTCIRGDEWLKHTGSIGRPICNGKVSIRNNQGKELPPRELGEIYMTFPDGCFDTEYMNKEQLETTKDGFRSVGDFGYIDEDGYLYFVDRRNDMLVTGGENVFVNEVETALLRHEGIMDAIVVGIPDEEWGRLIHAVIESTTGISEEELRTFLRQYLSPYKIPKTFEFVNNLTRVGNGKTDRDRILREYVSS

SEQ ID NO: 232 - protein, 651 aa, Proteocatella sphenisci
NIIQSIDQGGYKMSYEALFSPFKIRGLELKNRIILPGMNTKMTKSKHDIGEDLIAYHVARAKAGCALNIFECVAICPAPHAYMYMGLYNDHHVEQLKKLTDAVHEVGGKMSVQLWHGGFSPELFFDETNVLEKPENLSVERIHEIVEEFGLAAKRAVEAGFDSVEFHAAHSYLPHEFLSPGMNKRTDEYGGNFENRCRFLFETITAIRNNIPEDMPFFMRVGCIDELMDETMTEAEIVEFINRSADLGVDVADISRGNAVSFATVYEVPPFNLAHGFNIENIYNIKKQIKIPVMGVGSIKTGEMANRVIEEGKFDLVGIGRSQITDPDWVAKVRDGKEDTIRHCIGCVQGCYDAIIDPKMKSITCTHNPMVAQEYKGLPKTEEAKKVMIIGGGMAGLMAAQILKKRGHEPVIFESSDKLSGQFALAGVAPMKQDWANMAIWEAEEVKRQGIEVMLNTAVTPEKIAEIAPDHVIIAIGSDYVAPEIPGIDSPNVYSQYQVLRGEVNPTGHVAVVGCGLVGTEVSQLLASRGQEVTAIERKGIGTGMNMLRRMFLPGELKYYKIAKLAGTDVTGIKPGEIHYNITDKKTKEIIPGTLECDSVVICTGITSRPSEDLKAKCQELNIPYNVIGDAVKARDARIATLEGYNVGMSI

SEQ ID NO: 233 - protein, 172 aa, Proteocatella sphenisci
KGFIDMTLEERIIALEKEIQNINDIEAIKELKGKYFRCLDSKHWDELESTLSPNIVTSYSDGKLVFKSPKEVTDYLRSAMPPEEISMHTGHTPEITLESENIASGRWYLEDKLIFTDGKYKGIEVNGGAFYTDKYEKVDGQWYILETGYVRIYEENFRRDEKRRILTNMHDK

SEQ ID NO: 234 - protein, 256 aa, Proteocatella sphenisci
TTRRDKIMKLVQDKITVITGGTRGIGFAAARKFIENGAKVAIFGETQPEVDAALAELKGLYPEEEVLGFAPNLASRDEVMGAVGAVAQKYGRLDVMINNAGVSMNTVFSKVEEDEFKNIVDVNLIGVFNGAWAAYQCMKDAKKGVIINTASVTGVYGSLSGIGYPTTKAGVIGLTHGLGREIVRKNIRVVGVAPGVVNTDMVSGMPQEILDGYLKTLPMKRMLEAEEIANVYMFLASDLASGITATTISVDGAYRP

SEQ ID NO: 235 - protein, 444 aa, Proteocatella sphenisci
KPVILKITLTLTNKHKGDINMAGLKDFPQFGALSGLKVLDSGSNIAGPLGGGLLSECGSTVIHFEAPNKPDNQRGWYGYPQNHRNQLSMVADIKTEEGREIFFKLIKWADIWVESSKGGQYDRLGLSDEEIWKVNPKLAIVHVSGYGQTGDPAYVTKASYDAVGQAFSGYMSLNGTTEALKVNPYLSDFVCGLTTCWTMLACYVSTMLTGKGESVDVAQYEALARIMDGRMMQYATDDIKMPRTGNKDTQAALFSFYTCKDGKTIFIGMTGAEVCKRGYPLIGLPVPGTGDPDFPEGFTGWLINSPVGQRMEAAVEKFVSENTMEEVEALMHANQIPCQRVYELEDCLNDPHWKARETVMEWDDPMMGRVKGLGLINKFKNNPSQIWRGAPLFGMDNKDILKDLGYSDEEIQSLYEKGITKEFDLATTIKRYRLEEVIPHMRKK

SEQ ID NO: 236 - protein, 494 aa, Proteocatella sphenisci
NKKEGDYIMDAALNKKGNNIKPATDYKKGFIPYAVAALMLGLIGGFTAVLAPAFVADQGLAYNNTTWISLALAMSAAACAPILGKLGDVLGRRKTLLIGIGIFTLGNILTAIAPSLMLMLAARFVVGIGTAAIAPVVMSYIVSEYPPAEMGKGFAVYMLVSSGAVVVGPTCGGLIMKAAGWRVMMWVCVAICALVFLFCSLVIKKTAFEKKSLVDFDKKGAALVVVFFSLFLCVPSFGQNIGWGSTLFMTVAGVAIISLFALIKVEKKVKNPVLNGTFMARKEFILPVMILFLTQGLMQANMTNVIVFVRYTQPDNVLIASFAISIMYIGMSLGAILIGPKADKKEPRSILTFSLVLTGIGCAIMYFFKADSSIAIFAASLGILGIGLGGNATIFMKVALSGLSSELAGSGTGTYGLFRDIAAPFGVAVFVPMFTNSVTRLIDRATVAGAEQGAAVVQAATSSIQTLALIEVACIIAGIIIVRMMPKIHDSKAK

SEQ ID NO: 237 - protein, 668 aa, Proteocatella sphenisci
SVMKRGSIIMKNSKLFSPLKVGSLTLQNRVGMAPMSMDYEVADGTVPKRLADVFVRRAEGGTGFVIIDAVTVDRKYPYMGNTTCLDSDDLVPQFKEFAKRVGNTGSTLIPQIIHPGPESVCGYRNIAPMGPSVNTNANCHVSRAISIDEIQTVIKQYGEAARRVEESGCGGIFLHCAHAYMLPGAFLSPLRNKRMDEYGGSLDNRARLMLEIIAQVRKNVSPDFPIFLRVSGDERTIGGNSLEDMIYLARKFEAAGVNLIEVSGGTQYEGMEHIIPCQNKNIGVNVYEASEIRKAVNIPVFVVGKINDIRYAADIVERGLVDGVSMGRPLLADPDICNKAMENRFEDITPCANCGGSCISRSAESPQCHCHVNPLVGREYDFPEVPAEKPKKTLVIGAGPGGMYAAVTAAERGHDVTVWEADSIIGGQINLAVVSPGKQEMTKWMVHLNHRAKKAGVNIEFNKEATIDAVREFAPEAVIVATGARPLVPPIKGTQDYPVLTAHDFLRGKYVIPKGRVCVLGGGAVACETAEAVMVNARPSAYIRGFNSSIGDVEVTLIEMMPQLLTGVCSPNRGPLIRKLKESGVDINVNTKILEVTDHAVKVQRLDGSEEWLQGFDYILFGLGSRNYDPLSAELKEFVPQVHVIGDAVRARQASFAMWEGFETAYSL

SEQ ID NO: 238 - protein, 669 aa, Unknown
  Description of Unknown: BaiH midas Romboutsia sp 25236 Romboutsia sp 25236|FJTZ01000011 310 sequence
NLFKGEVIMDNFKLYTPINIGNVEIKNRVLMAPMSLGYEEKDGNVSSRLQDFWIERAKGGVGLIVVDAVTVDSSVPYLGFTISLGEDKFIPKFKSFVDEIHANGSKLFPQITHPGPESISWMFGKTPVASSNYINSLGKSVRELKVEEIEAIVEQYGDAARRAKEAGCDGVEFHCAHAYMLAGSFLSPLRNKRTDCYGGNLDGRAKFAFDVIKNIKKKAGDDFPILMRISGDERVLGGNTLNDMLYLVPKFVEAGVDAFEISGGTQYELCWKIIPCHYESPGVNIKEAEAIKKVSKVPVFVVGKINDIKLGENLVEREVVDGVVFGRPLLADPELVNKGFEGRYEDIRPCASCGGPCITRERSNPVAKCAINPELGREKEMTITEAKIKKNVVIVGGGPAGLETARIAAKRGHKVTLIEKSDRLGGQINLAAIPPHKQDLTRWVKYLKTQVEKSNVEVKLNTEATAEYIKELNADVCIISTGSTPFIPKVKGIENIEVITGSDVLSAKVKDAIHGKVLVVGGSLVGCEVTETILHNAVGPVQIHMIEMLGEIAPNLCPNNKVPLMKMLNEKGVVMSTNTKLLEITEDGTGVIVEKDGKEEVLNGFSKIIFCCGAKPINNLAEELKDVEVHLIGDANKPGQVHHAIEAGAILARKIGDVENLDGEKELAN

SEQ ID NO: 239 - protein, 176 aa, Unknown
  Description of Unknown: BaiE midas Romboutsia sp 25236 Romboutsia sp 25236|FJTZ01000011 311 sequence
IGGASMSTIEKLEQRLIEMEKEITRLKDIEFIKSLKGKYLRCLDSKLWDTIGECFCEDVTTSYSDGKLSFTGKEEVVNFFRTCMPQEHITMHQCHTPEIEFESDTKAFAYWYLGDNLILLDRNMGIRGGAFYRESYEKVNGEWKIKTIGYKRTFEERWDRNDPQNAKITYNMHSKE

SEQ ID NO: 240 - protein, 260 aa, Unknown
  Description of Unknown: BaiA midas Romboutsia sp 25236 Romboutsia sp 25236|FJTZ01000011 2936 sequence
LTYKLTLKGINFMKLKNKVAIVTGGSRGIGFAIVDRYVKEGAKVAICGSRAETANNALNLIKKKYPNADVIAVHANMSSTDEINEMFKQVVDKWGYVDILVNNAGITATKDIDLMTDEEFEEVMDVNVTGMFRCTRAAVKIMKARGGNIINTSSLVSVNGAGRQCAYTASKFAVNGLTRSFARELGKYNIRVNAVAPGSVATEMVKKFVTDQMVEHMRQVTPLGKMAEPYEMAGAFVYLASEDSSYTTGAILNIDGGIVM

SEQ ID NO: 241 - protein, 651 aa, Unknown
  Description of Unknown: BaiCD midas Romboutsia sp 25236 Romboutsia sp 25236|FJTZ01000011 2937 sequence
ILIVKGDMIMNYNSLFSPFKIKDLEIKNRVILPAMMTKMASPTGLVTQNLIDYHVAIAKGGCGLNFTEVCAIHPSTHGNGYVALYKDEHFEGMKKLIDSVHSVGGKIGVQIWHGGQVAIALLPKDRTPMVTEGMTHENIKEIVDCYGKSTKMAVKAGCDAIEFHAAHTYLPHTFLSAAFNKRDDEYNGSLENRARFSLEVIRTMRANMPETMPLFMRVDALDDYVQNGLTIEDVIEFLKMAKAEGVDIIDISRGNNKSAALKYEVPSIDTPRGYNIENVKKIRDAIEMPVVGVGRINHPEIANKFIEEEKCDLVAIGRAQITDHEFCNKAKDGKTDSIRLCVGCLKGCFDSIMNPNIPTITCMRNPMVGKEGQPITKTTNPKTVLIAGGGMGGMMTANMLKVRGHNPILCEASNKLGGQFNLAGAAPYKGEMLDAVNWEAKEATRLCVDVRLNTVVTPELVSQINPDEVIIATGAVASKPEIKGIESKNVFTYEEVLSGNIELSGNVVILGGKMVGLETAQYLTDKGIKCTVIDESDRFGGDLGWIRSMNMLENMYVIGVNQIPGAKVVEIKENEVVYVKDETETSINCDAVVVALGATSVALEDVQLKCRDLEIPFHVIGDAKSPRVALNSTLEGIEVALNIDSENALNV

SEQ ID NO: 242 - protein, 669 aa, Unknown
  Description of Unknown: BaiH midas Romboutsia sp 25236 uncultured Clostridium 85266|FMGS01000001 1945 sequence
NLFRGEVIMDNFKLYTPINIGNVEIKNRVLMAPMSLGYEQKDGNVSSRLKDFWIERAKGGVGLIVVDAVTVDSSVPYLGFTISLGEDKFIPTFKEFVAEIHANGSKLFPQITHPGPESISWMFGKTPVASSNYINGLGKSVRELKVEEIESIIEQYGDAARRAKEAGCDGVEFHCAHAYMLAGSFLSPLRNKRTDCYGGNLDGRAKFALDVIKNIKKKAGDDFPILMRISGDERVLGGNTLNDMLYLVPKFVEAGIDAFEISGGTQYELCWKIIPCHYESPGVNIKEAEAIKKVSKVPVFVVGKINDIKLGENLVERDVVDGVVFGRPLLADPELVNKGFEGRYEDIRPCASCGGPCITRERSNPVAKCAINPELGREKEMAITEAKIKKNVVIVGGGPAGLETARIAAKRGHKVTLIEKSDRLGGQINLASIPPHKQDLTRWVKYLKTQVEKSNVELKLNTEATAKYIKELNADVCIISTGSTPFIPKVKGIENVEVITGSDVLSAKVKDAIHGKILVVGGSLVGCEVTETILHNAVVPVQIHMIEMLGEIAPNLCPNNKVPLIKMLNEKGVVMSTNTKLLEIIEDGTEVIVEKDGKEEVLSGFSKIIFCCGAKPVNNLAEELKDIEVYVIGDANKPGQVHHAIEAGATLARKIGDVENPDGKKVLAN

SEQ ID NO: 243 - protein, 188 aa, Unknown
  Description of Unknown: BaiE midas Romboutsia sp 25236 uncultured Clostridium 85266|FMGS01000001 1946 sequence
KIQMAKKYLQIKKGGASMSTIEKLEQRLIEMEKEITRLKDIEAIKSLKGKYLRCLDSKLWDTIGECFCEDVTTSYSDGKLSFTGKEEVVNFFRTCMPPEHITMHQCHTPEIEFESDTKAFAYWYLGDNLILLDRNMGIRGGAFYRESYEKINGEWKIKTIGYKRTFEERWDRNDPKSAKITYNMHSKE

SEQ ID NO: 244 - protein, 260 aa, Unknown
  Description of Unknown: BaiA midas Romboutsia sp 25236 uncultured Clostridium 85266|FMGS01000001 10981 sequence
ITYKLNLKGINFMKLKNKVAIVTGGSRGIGFAIVDRYVKEGAKVAICGSKAETANKALNLIQEKYPNADVMAVHANMSNNDEINEMFKQVVDKWGYVDILVNNAGITATKDVDLMTDEEFEKVMDVNVTGIFRCTRAAVKIMKAHGGNIINTSSLVSVNGAGRQCAYTASKFAVNGLTRSFARELGKYNIRVNAVAPGSVATEMVKEFVTDQMVEYMRQMTPLGKMAEPYEMAGAYVYLASEDSSYTTGAILNIDGGIVM

SEQ ID NO: 245 - protein, 651 aa, Unknown
  Description of Unknown: BaiCD midas Romboutsia sp 25236 uncultured Clostridium 85266|FMGS01000001 10982 sequence
ILIVKGDIIMSYNSLFSPFKIKDLEIKNRVILPAMMTKMASPTGLVTQKLIDYHVAIAKGGCGLNFTEVCAIHTSTHGNGYLALYKDEHFEGMKKLIDNVHSVGGKIGVQIWHGGQVAIALLPKDRTPMVTEGMTHEDIKEIVDCYGKSTKMAVEAGCDAIEFHAAHTYLPHTFLSAAFNKRDDEYSGSLENRARFSLEVIRTMRANMPETMPLFMRVDALDDYVQNGLTIEDVIKFLKMAKAEGVDVIDISRGNNKSAALKYEVPSIDTPRGYNIENVKKIRDAIKMPVVGVGRINHPEIANKFIEEEKCDLVAIGRGQITDHEFCNKARDGKTDSIRLCVGCLKGCFDSIMNPTIPTITCMRNPMVGKEGQPITKTTNPKTVLIAGGGMGGMMTANMLKVRGHNPILCEASNKLGGQFNLAGAAPYKGEMLDAVDWEAKEATRLCVDVRLNTVVTPELISQINPDEVIIATGAVASKPEIKGIENKCVFTYEEVLSDSVELSGNVVILGGKMVGLETAQYLTDKGVKCTVIDEAERLGGDLGWIRSMNMLENMYVIGVNQVTGAKVVEIKENEVIYVKGETKTSVNCDAVVVALGATSVALEDVQSKCRDLEIPFHVIGDAKSPRVALNTTLEGIEIALNLDSENALNI

SEQ ID NO: 246 - protein, 188 aa, Eubacterium sp.
QEECNMKIMKQDVKIQKLVIEVMKHVRQQTYTPEQLCERQRILDAQYFYYWSMDMKKEEYVCDLFTEDFTYRCFTESPTEPKDQAMRSKYVNRNMMTMHMSHNPLIWLIDETHARGIFLYEDNNSYKDHTVEGFSMYCNDFRKCEDGVWRISKMRIGYRKMNGALDDYDVPKDWEPKKWEEWNCHMEV

SEQ ID NO: 247 - protein, 671 aa, Eubacterium sp.
FPYRSGSYGGTMTPVNLVNLFNNERKEDDFKMSYDALFSPIKLRGLELKNRIVLPGMNTKMVKDKHHVADDMIQYHAARAAGGCGLNIVELVSICKECHAYLYFGLYSEADRDELKKVTEAIHENGGKAAVQIWHGGFVPADFFDKTNVEETPDTVTVERIHEIIKQFGESAKLAVEAGFDALEFHGAHTYLPHEFMNPSLNNRTDEYGNQSLENRCRFNLEVIREMRANMPEDMPLLMRLDAVDELLPKNTTVEETIQFVNWAEEAGVDAIDLSRGNARSLATVYEVPPYNLEPGFNMENIAKIKKAVNIPVIGVGRVNMPALANKLIEDGEIDMIAIGRAQLADPEWCNKAREGREDEIRRCIGCTEGCYDKVIDPKATHITCTRNPMLCLEYKGMPKAEKAKNVMVIGGGIGGLVTAEILKKRGHNPTIYEASERAGGRFRLAGKAPKKQEFEAAVDWEIKECERLGIEIKTNTTVTPEMIAEIKPDHVVVAIGSEFATPDLPGVDGADIVTAEDVLAGKAEAKGEILILGGGLVGCETATYLINKGEKNVRIMDSRRVGKAMGMLRSMFLDIEYPGKTIQKSNRSKVTAIGDHTVDYKFTDKFKKTSNKSRSFDTLVLATGAKSRPTADLTAKCDELGIAYNVIGDAKKVRMGIDATADAYKVGMEV

SEQ ID NO: 248 - protein, 193 aa, Eubacterium sp.
SRYGGIKMTVEERLEALEKELQQIKDVQAIKELKSKYFQALDTKNWDELETTMAPDIETAYSNGKLVFHGPKEITDYFKKSMPKTEITLHQGHNPQVWFESDTVAYGKWYLEDRLIFAKGDPYEGLQVEGSAIYTDKYVKIDGEWLIQDTGYIRIYEEQFMRDETHRIRKNMFAPKKKKVVKKKKTAAVKKEQ

SEQ ID NO: 249 - protein, 692 aa, Eubacterium sp.
QKNVKHRLRDSFILCSTDKFSICSGGNKMITDMKDAKIFQPLQLGRTTLKNRIAMAPMSMHYEATNGTVPKQLADIFVRRAEGGAGYVVIDAVTVDHKYWYIGKTTALDKDSLVPQFKRFATRVKDAGSELIPQIIHPGPESICAMKGITPIGPSINTNANGDVSRPATIKEIQKIIKQYGKAARRAEEAGCGGIALHAAHAYMLPGAFLSPLRNKRMDEYGGTIDNRARLILEIIEECRKNVSEDFPIILRISGSERIEGGNSLEEMLYLAPKFEAAGVNMLEVSGGVQYEDMQDIIPSHSKKIGRNVYEASEIKKVVNIPVFVVGKINDIRYAADIVERGLVDGVSLGRPLLADPDLPNKARENRFDDITPCASCGGRCVTPKDPQHPVCQCHINPLVGHEYDYPFNPVDTPKNVLVVGAGPGGMYAAVIAAERGHHVTVWEKNCQVGGQLALAVVTPGKQEMCKWLSHLTYRANKAGVTFEFNKEATVDDIKEFAPDAVIVATGARPFVPPFIKGLTDYPVTTTHDILSRKVTVPKGTVCILGGGEVACETAEMLMTDARPASFVKTGSIGDVEVTLVEMMPQLMTNVCLPNRNVLMDSLHRSGVKSYVNAKVLEVTDHDVKIQYTTDGREEWLRGFDHIVVGMGSRNYDPFSEELKKFVPEVRVIGDAVRTGLASKALHEGYFAGYEI

SEQ ID NO: 250 - protein, 282 aa, Eubacterium sp.
IFEGTGNFRKTTKNQREYQEKERGFIQMFEKEFEGKVVLVTGGSTGIGYATVKSFLATGAKVYFLGKPGEDLTKQTEELKAINPDYDFASNTIDLCDYKAAQALYAEIEEKWGRLDVLVNNAGVDSSLPIHKMKQSQWDYVMNVNLKGMFNLTKYAIKYLKKTKGCIVNTASVAGIYGAGCGCPYPASKGGVIAFTKSMAWEQAYAGIRCNAVAPGVIDTNLLATVPPFAKKNLAKQIPLGYIGAPQEIANAILFLSSSAAQYITGVTLQVDGGYVPHNTAG

SEQ ID NO: 251 - protein, 535 aa, Eubacterium sp.
AKFEFKQIHKGDVIVSTKHFNIFNTGESSFFTPGVQLANIARVKPDAPAIVYINPENKESVMTWHSLEVLSNRIAWYLLEQGIKPGKSVIVALPNIPTHIALAFGIWKAGGCYVPVSPRVPRKNMIEICECVSPSLVITNRWKPEGCLSLSSSELKTISEDYPEHMPPDIMAVPNLANCSGGTSGKTKVIEQDMAAGESDEGLKTWFAISGMRFEMRQLLAGPLFHGAPHSVAFNGLYCGNTLYIPSCFDAKAIVALIKKYKIEYVQMVPTLMQRIIRLPDFNPEDLQSLEVFCHTGGVCSADLKRKWFDILPPEKIYEIYSMTECVGMTSIRGDEWLAHEGSVGRMPCGEIAIRDSEGHNLPIGETGEIFMSWGPNKPKVTYKNITPLESDENGFRSVGDIGYVDNEGYLYFKDRRSDMIVTGGENVFAAEIESVLKKHKKVNDAVVVGLPDKEWGHRIHAFVETTELVSDKTLIKFALNYLPPYKIPKSFEHIDHIPRNESGKVVRSQLVEDYLKRHADTCSSSSTKGEKHGE

SEQ ID NO: 252 - protein, 459 aa, Eubacterium sp.
ERMNNMKEINNKLTQKFDEYPTFGVLQGVKVFVTGTNIAGPFAGSLMAEMGAKVLQAEAPSIACQTRGTLAWSQNHRNEYSITINMAKKSGQKIFLKCIEWADIWIEAGRPGSYAKRGLTDKVCWEHNKKLSIVHVSGYGQFGPSKDKPSYDVSGQAMGGYMYMNGVSPTSGPLKVNPYLSDYITAYNACIAAMAGYIGAQNTGEGDSCDVAQYDTMFRLLDNYPANWFNKGYPKQGEPVPYRTGNKSDMASCFSFYDTKDGGAMFVAIVGQGPVKRGYPIIGMGKPGITKGIPKNCTGFPLFDPRGKQADELCAKFCAERTCDELEEIFNKAAIPCQRAYGPADIENDPQYEARENIVEWEDQCFGKMKGIGLTNIFKKHPSQIVAAAPCFGEHNREVLESFGYTKEEIDAMYDKGDLVTWTPADTARIKNFVEWNFFWDPENQAKRIGLEYPPKKDK

1. A method of selecting a subject in need of supplementation with bile acid transforming bacteria that produce a secondary bile acid from a primary bile acid, the method comprising:
determining a number of bacterial clades or species in a microbiome of an individual that comprise a nucleic acid comprising a bile acid metabolism consensus sequence associated with production of the secondary bile acid from the primary bile acid; and
selecting the individual as the subject on the basis of determining that the number of bacterial clades or species is less than five.

2. The method of claim 1, wherein the bile acid metabolism consensus sequence is at least 20 bp in length and includes all or a portion of a gene encoding a gene product that acts in a metabolic pathway that produces the secondary bile acid.

3. The method of claim 2, wherein the gene is selected from the group consisting of a bai gene, a gene encoding 3α-hydroxysteroid dehydrogenase, a gene encoding 3β-hydroxysteroid dehydrogenase, a gene encoding 5β-reductase, a gene encoding 5α-reductase, a gene encoding 3β-HSDH, and a combination thereof.

4. The method of claim 1, further comprising the step of administering to the subject the bile acid transforming bacteria.

5. (canceled)

6. (canceled)

7. A method of treating a deficiency in the metabolism of a primary bile acid to a secondary bile acid in a subject in need thereof, the method comprising:
administering a bacterial isolate to the subject to treat the deficiency, wherein the bacterial isolate comprises a bai gene,
wherein the subject is selected by determining that
(a) a level of the secondary bile acid in a stool of the subject is less than a threshold value, or
(b) a level of the primary bile acid in a stool of the subject is greater than a threshold value.

8.-14. (canceled)

15. The method of claim 7, wherein the administered bacterial isolate comprises a bai operon.

16. The method of claim 7, further comprising administering to the subject a consortium of fecal bacteria from a human donor.

17. The method of claim 16, wherein the consortium of fecal bacteria comprises uncultured fecal bacteria.

18. The method of claim 16, wherein the consortium of fecal bacteria comprises fermented fecal bacteria.

19. (canceled)

20. The method of claim 19, wherein the deficiency in metabolism of the primary bile acid to a secondary bile acid is associated with a disorder is selected from the group consisting of inflammatory bowel disease, ulcerative colitis, Crohn's disease, hepatic encephalopathy, hepatitis B, an autism spectrum disorder and a C. difficile infection.

21.-28. (canceled)

29. The method of claim 1, wherein the bile acid transforming bacteria are capable of transforming a primary bile acid to a secondary bile acid, and (i) the primary bile acid is selected from the group consisting of cholic acid, chenodeoxycholic acid and a combination thereof or (ii) the secondary bile acid is selected from the group consisting of deoxycholic acid (DCA), isodeoxycholic acid, glycodeoxycholic acid (GDCA), taurodeoxycholic acid (TDCA), glycolithocholic acid (GLCA), taurolithocholic acid (TLCA), lithocholic acid (LCA), ursodeoxycholic acid (UDCA), isoursodeoxycholic acid, glycoursodeoxycholic acid (GUDCA), tauroursodeoxycholic acid (TUDCA) or a combination thereof.

30.-36. (canceled)

37. The method of claim 4, wherein the bile acid transforming bacteria are derived from a human donor.

38. The method of claim 4, wherein the bile acid transforming bacteria comprises
one or more bai genes.

39.-47. (canceled)

48. A method of treating a subject in need of supplementation with bile acid converting bacteria, the method comprising:
determining a deficiency of a secondary bile acid in the subject,
wherein the deficient secondary bile acid comprises at least isoalloLCA; and
administering to the subject bile acid converting bacteria, wherein following administration the bile acid converting bacteria produce the isoalloLCA in the subject.

49. The method of claim 48, wherein the determining is based on a functional assay that determines a presence or level of a secondary bile acid or bile acid converting bacteria.

50. (canceled)

51. The method of claim 49, wherein the functional assay is a TGR5 reporter cell assay.

52. The method of claim 48, wherein the bile acid converting bacteria comprise bacteria from one or more genus selected from the group consisting of Bacteroides, Parabacteroides, Butyricimonas, Odoribacter, Porphyromonas, Alistipes, and a combination thereof.

53. The method of claim 48, wherein the bile acid converting bacteria comprise bacteria from one or more species selected from the group consisting of Bacteroides uniformis, Bacteroides finegoldii, Bacteroides fragilis, Bacteroides dorei, Bacteroides vulgatus, Bacteroides caccae, Bacteroides ovatus, Bacteroides eggerthii, Bacteroides thetaiotaomicron, Parabacteroides goldsteinii, Parabacteroides distasonis, Parabacteroides merdae, Butyricimonas synergistica, Odoribacter laneus, Porphyromonas somerae, Alistipes indistinctus, Alistipes onderdonkii, Alistipes finegoldii, and a combination thereof.

54.-61. (canceled)

62. The method of claim 48, further comprising administering to the subject a DNA sequence that encodes an enzyme that functions in the metabolic pathway that synthesizes isoalloLCA.

63. The method of claim 62, wherein the enzyme is selected from the group consisting of 5β-reductase, 5α-reductase, 3β-HSDH, and a combination thereof.
